(19) United States
(12) Patent Application Publication
(10) Pub. No.: US 2025/0270575 A1
(43) Pub. Date: Aug. 28, 2025

(54) COMPOSITIONS AND METHODS FOR INDOOR AIR REMEDIATION

(71) Applicant: Neoplants SAS, Saint Denis (FR)

(72) Inventor: Patrick Torbey, Saint-Ouen (FR)

(21) Appl. No.: 18/284,959

(22) PCT Filed: Apr. 7, 2022
(86) PCT No.: PCT/EP2022/059345

§ 371 Date: Sep. 29, 2023

Related U.S. Application Data
(60) Provisional application No. 63/171,872, filed on Apr. 7, 2021.

(51) Int. Cl. C12N 15/82; A01H 1/04; B01D 53/34; C12N 1/20; C12R 1/01

(52) U.S. Cl. CPC C12N 15/8259; A01H 1/04; B01D 53/34; C12N 1/20; B01D 2251/95; B01D 2257/708; C12R 2001/01

(57) ABSTRACT

The present disclosure provides compositions, methods of use, and methods of creation for a population of transgenic plants derived from plant cells transformed with recombinant DNA for expression of heterologous proteins. In particular, the present disclosure provides compositions comprising indoor ornamental plants suited for the removal of volatile organic compounds such as formaldehyde, benzene, toluene, ethylbenzene and/or xylene from air. Also disclosed are transgenic seeds for growing a transgenic plant having the recombinant DNA in its genome and exhibiting enhanced VOC removal from air. Also disclosed are methods for generating seed and plants based on the transgenic events. Also disclosed are microbes selected for during directed evolution to have enhanced VOC removal from air capabilities. Also disclosed are methods and compositions for generating plant-microbiome pairings for enhanced VOC removal from air.

### CROSS-REFERENCE TO RELATED APPLICATIONS

[0001] This application claims priority to U.S. Provisional Application No. 63/171,872 filed Apr. 7, 2021, the entirety of each of which is incorporated herein by reference.

### BACKGROUND

[0002] Indoor air contamination is a complex and ubiquitous problem, involving particles (such as dust and smoke), biological agents (molds, spores), radon, asbestos, and gaseous contaminants such as CO, CO₂, NOₓ, SOₓ, aldehydes and Volatile Organic Compounds (VOCs). Many of these particulates have been directly linked to disease states or are strongly suspected to cause disease. Compounds such as VOCs are thought to cause many Indoor Air Quality (IAQ) associated health problems and potentially “sick-building syndrome” symptoms. As such, there is a pressing need for the creation and production of compositions and methods suitable for purifying indoor air.

### SUMMARY

[0003] The present disclosure provides technologies for improving indoor air quality. Among other things, the present disclosure provides an insight that certain ornamental plants can be engineered and/or cultivated to improve air quality, for example, through removal of VOCs and/or other agents from the air.

[0004] In some embodiments, provided technologies include and/or utilize engineered proteins (e.g., enzymes that capture and/or detoxify air-borne agents), genes, plants, and/or microorganisms (e.g., in the plant biome) and/or technologies for developing, producing, and/or utilizing them. In some embodiments, provided technologies includes systems (e.g., methods and/or components) for cultivating plants and/or associated organisms (e.g., microorganisms for example that may participate in a plant microbiome.

[0005] In some embodiments, the present disclosure provides an insight that a multifactorial approach to improving indoor air quality may be particularly useful, among other things because such a strategy effectively purify air, while avoiding single point failures.

[0006] In some embodiments, provided technologies enhance pollutant entry rate inside a plant through increased stomatal conductance. Alternatively or additionally, in some embodiments, provided technologies engineer optimized synthetic degradation pathways inside plant(s). Still further alternatively or additionally, in some embodiments, the present disclosure provides technologies for increasing depolluting capacity of a plant's microbiome.

[0007] Among the advantages achieved by embodiments of technologies provided herein are dramatically augmented phytoremediation efficiency of indoor plants. In some embodiments, a single potted neoplant as described herein can achieve VOC removal effectiveness comparable or superior to that typically observed with a traditional biowall.

[0008] In some embodiments, provided technologies include an engineered ornamental indoor plant characterized in that: (a) it expresses at least one (heterologous) formaldehyde and/or methanol metabolism polypeptide: and (b) when cultivated in an environment comprising a volatile organic compound (VOC), exhibits an increased rate of air VOC removal, when compared to an ornamental indoor plant that has not been so engineered.

[0009] In some embodiments, provided technologies include an engineered ornamental indoor plant that is stably transformed with at least one expression vector from which the at least one formaldehyde metabolism polypeptide is expressed. In some embodiments, provided technologies comprise a plurality of formaldehyde metabolism polypeptides that are expressed from at least one expression vector. Further still, in some embodiments, provided technologies comprise a plurality of expression vectors from which a plurality of formaldehyde metabolism polypeptides are expressed. In some embodiments, provided technologies comprise a plurality of polypeptides that are designed to function in concert to chemically convert a VOC to a usable sugar substrate.

[0010] In some embodiments, provided technologies comprise an engineered ornamental indoor plant expressing at least one heterologous formaldehyde metabolism polypeptide. In some embodiments, a provided heterologous formaldehyde metabolism polypeptide comprises: 3-hexulose-6-phosphate synthase (HPS), 6-phospho-3-hexuloisomerase (PHI), dihydroxyacetone synthase (DAS), dihydroxyacetone kinase (DAK), formaldehyde dehydrogenase (FALDH), glutathione-dependent formaldehyde dehydrogenase (GSH-FALDH), glycolaldehyde synthase (GALS), acetyl-phosphate synthase (ACPS), phosphate acetyltransferase (PTA), 2-keto-4-hydroxybutyrate aldolase (KHB), branched-chain alpha-keto acid decarboxylase (KDC), pyruvate decarboxylase (PDC), NADH-dependent 1,3-PDO oxidoreductase (DhaT), non-specific NADPH-dependent alcohol dehydrogenase (YqhD), serine aldolase (SAL), threonine aldolase (LtaE), serine deaminase (SDA), 4-hydroxy-2-oxobutanoate (HOB) aldolase (HAL), HOB aminotransferase (HAT), serine hydroxymethyltransferase 1 mitochondrial (SHM1), (S)-2-hydroxy-acid oxidase (GLO1 and/or GLO2), formate dehydrogenase (FDH), and/or formolase (FLS).

[0011] In some embodiments, provided technologies comprise at least one heterologous formaldehyde metabolism polypeptide, wherein the polypeptide comprises 3-hexulose-6-phosphate synthase (HPS), and/or 6-phospho-3-hexuloisomerase (PHI). In some embodiments, provided technologies comprise at least one heterologous formaldehyde metabolism polypeptide, wherein the polypeptide comprises dihydroxyacetone synthase (DAS), and/or dihydroxyacetone kinase (DAK). In some embodiments, provided technologies comprise at least one heterologous formaldehyde metabolism polypeptide, wherein the polypeptide comprises formaldehyde dehydrogenase (FALDH), glutathione-dependent formaldehyde dehydrogenase (GSH-FALDH), serine hydroxymethyltransferase 1 mitochondrial (SHM1), (S)-2-hydroxy-acid oxidase (GLO1 and/or GLO2) and/or formate dehydrogenase (FDH). In some embodiments, provided technologies comprise at least one heterologous formaldehyde metabolism polypeptide, wherein the polypeptide comprises formolase (FLS), and/or dihydroxyacetone kinase (DAK). In some embodiments, provided technologies comprise at least one heterologous formaldehyde metabolism polypeptide, wherein the polypeptide comprises glycolaldehyde synthase (GALS), acetyl-phosphate synthase (ACPS), and/or phosphate acetyltransferase (PTA). In some embodiments, provided technologies comprise at least one heterologous formaldehyde metabolism polypeptide, wherein the polypeptide comprises 2-keto-4-hydroxybutyrate aldolase (KHB), branched-chain alpha-keto acid decarboxylase (KDC), pyruvate decarboxylase (PDC), NADH-dependent 1,3-PDO oxidoreductase (DhaT), and/or non-specific NADPH-dependent alcohol dehydrogenase (YqhD). In some embodiments, provided technologies comprise at least one heterologous formaldehyde metabolism polypeptide, wherein the polypeptide comprises serine aldolase (SAL), threonine aldolase (LtaE), serine deaminase (SDA), 4-hydroxy-2-oxobutanoate (HOB) aldolase (HAL), and/or HOB aminotransferase (HAT).

[0012] In some embodiments, provided technologies comprise an engineered ornamental indoor plant expressing at least one heterologous formaldehyde metabolism polypeptide, wherein prior to introduction to the ornamental indoor plant, the at least one heterologous formaldehyde metabolism polypeptide has been modified using protein evolution.

[0013] In some embodiments, provided technologies comprise a cell or a population of cells derived from an engineered ornamental indoor plant expressing at least one heterologous formaldehyde metabolism polypeptide.

[0014] In some embodiments, provided technologies comprise an engineered ornamental indoor plant characterized in that: (a) it expresses at least one (heterologous) benzene, toluene, ethylbenzene, or xylene (BTEX) metabolism polypeptide: and (b) when cultivated in an environment comprising a volatile organic compound (VOC), exhibits an increased rate of air VOC removal when compared to an ornamental indoor plant that has not been so engineered.

[0015] In some embodiments, provided technologies comprise an engineered ornamental indoor plant that is stably transformed with at least one expression vector from which at least one BTEX metabolism polypeptide is expressed. In some embodiments, provided technologies comprise an engineered ornamental indoor plant that is stably transformed with a plurality of expression vectors from which a plurality of BTEX metabolism polypeptides are expressed. In some embodiments, provided technologies comprise an engineered ornamental indoor plant that is stably transformed with a plurality of polypeptides that are designed to function in concert to chemically convert BTEX to a usable anabolic substrate.

[0016] In some embodiments, provided technologies comprise an engineered ornamental indoor plant that is stably transformed with at least one expression vector from which at least one BTEX metabolism polypeptide, wherein the at least one heterologous BTEX metabolism polypeptide comprises: cytochrome P450 monooxygenase, O-xylene monooxygenase oxygenase subunit alpha, benzene monooxygenase oxygenase subunit, toluene-4-monooxygenase system ferredoxin-NAD (+) reductase component, toluene monooxygenase alpha subunit, aromatic ring-hydroxylating dioxygenase subunit alpha, hydroxylase alpha subunit, phenylalanine hydroxylase, benzene 1,2-dioxygenase, cis-1,2-dihydrobenzene-1,2-diol dehydrogenase, toluene methyl-monooxygenase, aryl-alcohol dehydrogenase, benzaldehyde dehydrogenase (NAD+), and/or benzaldehyde dehydrogenase (NADP+).

[0017] In some embodiments, provided technologies comprise an engineered ornamental indoor plant transformed with at least one heterologous polypeptide that alters the benzene and/or ethylbenzene metabolism pathway, wherein the heterologous polypeptide comprises benzene monooxygenase oxygenase subunit, benzene 1,2-dioxygenase, and/or cis-1,2-dihydrobenzene-1,2-diol dehydrogenase.

[0018] In some embodiments, provided technologies comprise an engineered ornamental indoor plant transformed with at least one heterologous polypeptide that alters the toluene and xylene metabolism pathway, wherein the heterologous polypeptide comprise O-xylene monooxygenase oxygenase subunit alpha, toluene-4-monooxygenase system ferredoxin-NAD (+) reductase component, toluene monooxygenase alpha subunit, toluene methyl-monooxygenase, aryl-alcohol dehydrogenase, benzaldehyde dehydrogenase (NAD+) and/or benzaldehyde dehydrogenase (NADP+).

[0019] In some embodiments, provided technologies comprise an engineered ornamental indoor plant transformed with at least one heterologous polypeptide that alters phenol and/or phenol (like) metabolism pathways, wherein the heterologous polypeptides comprise phenol hydroxylase component phP, phenol hydroxylase, and/or uncharacterized protein A4U43_C04F5180.

[0020] In some embodiments, provided technologies comprise an engineered ornamental indoor plant transformed with at least one heterologous polypeptide that alters catechol and/or catechol (like) metabolism pathways, wherein the heterologous polypeptides comprise 3-isopropylcatechol-2,3-dioxygenase, metapyrocatechase, extradiol dioxygenase, catechol 2,3-dioxygenase, and/or catechol 1,2-dioxygenase.

[0021] In some embodiments, provided technologies comprise an engineered ornamental indoor plant, wherein prior to introduction to the ornamental indoor plant, at least one heterologous BTEX metabolism polypeptide has been modified using protein evolution.

[0022] In some embodiments, provided technologies comprise a cell or a population of cells derived from an engineered ornamental indoor plant expressing at least one heterologous BTEX metabolism polypeptide.

[0023] In some embodiments, provided technologies comprise an engineered ornamental indoor plant created by crossing an engineered ornamental plant comprising at least one heterologous formaldehyde metabolism pathway polypeptide with an engineered ornamental plant comprising at least one heterologous BTEX metabolism pathway polypeptide. In some embodiments, provided technologies comprise an engineered ornamental indoor plant comprising at least one heterologous formaldehyde metabolism pathway polypeptide and at least one heterologous BTEX metabolism polypeptide. In some embodiments, provided technologies comprise a cell or population of cells derived from the engineered ornamental indoor plant comprising at least one heterologous formaldehyde metabolism pathway polypeptide and at least one heterologous BTEX metabolism polypeptide.

[0024] In some embodiments, provided technologies comprise an engineered ornamental indoor plant characterized in that: (a) at least one pathway related to diffusion and/or active transport of VOCs into the ornamental plant are modified; and (b) when cultivated in an environment comprising a volatile organic compound (VOC), exhibits an increased rate of air VOC removal when compared to an ornamental indoor plant that has not been modified.

[0025] In some embodiments, provided technologies comprise an engineered ornamental indoor plant that is stably transformed with at least one expression vector from which at least one polypeptide related to pathways regulating diffusion and/or active transport of VOCs into the ornamental plant is expressed. In some embodiments, provided technologies comprise an engineered ornamental indoor plant that is stably engineered to have at least one endogenous polypeptide involved in a pathway related to diffusion and/or active transport of VOCs into the ornamental plant modified. In some embodiments, provided technologies comprise an engineered ornamental indoor plant that is stably engineered to have at least one endogenous polypeptide involved in a pathway related to diffusion and/or active transport of VOCs into the ornamental plant knocked-out, silenced, and/or rendered hypomorphic.

[0026] In some embodiments, provided technologies comprise an engineered ornamental indoor plant that is stably engineered to have at least one endogenous polypeptide involved in transgene silencing knocked-out, silenced, and/or rendered hypomorphic. In some embodiments, a polypeptide involved in transgene silencing that is knocked-out, silenced, and/or rendered hypomorphic is RDR6.

[0027] In some embodiments, provided technologies comprise an engineered ornamental indoor plant that is stably transformed with at least one expression vector from which at least one polypeptide related to pathways regulating diffusion and/or active transport of VOCs is expressed. In some embodiments, provided technologies comprise an engineered ornamental indoor plant that is stably engineered to have at least one endogenous polypeptide related to stomatal flux knocked-out, silenced, and/or rendered hypomorphic, wherein the at least one polypeptide Epidermal Patterning Factor 1 (EPF1) and/or Epidermal Patterning Factor 2 (EPF2).

[0028] In some embodiments, provided technologies comprise an engineered ornamental indoor plant that is stably transformed with at least one expression vector from which at least one polypeptide related to stomatal flux is expressed, wherein the at least one polypeptide comprises Epidermal Patterning Factor-Like protein 9 (EPFL9) (STOMAGEN). In some embodiments, provided technologies comprise an engineered ornamental indoor plant that is stably transformed with at least one expression vector from which at least one polypeptide related to cuticle wax levels is expressed, wherein the at least one polypeptide comprises Aledehyde Decarbonylase (CER1), Fatty Acid Reductase (CER3), Beta-ketoacyl-coenzyme A Synthase, 3′-5′-exoribonuclease family protein (CER7), and/or WOOLLY. In some embodiments, provided technologies comprise an engineered ornamental indoor plant stably transformed with at least one expression vector from which at least one polypeptide related to trichome development is expressed, wherein the at least one polypeptide comprises MYB123-Like, Caprice (CPC), GLABRA1, GLABRA2, and/or GLABRA3. In some embodiments, provided technologies comprise an engineered ornamental indoor plant that is stably transformed with at least one expression vector from which at least one heterologous polypeptide related to active transport of VOCs is expressed, wherein the at least one polypeptide comprises an Oxalate: Formate Antiport polypeptide, Formate: Nitrite Transporter polypeptide, and/or 2FoCA-Anion Channel polypeptide. In some embodiments, provided technologies comprise an engineered ornamental indoor plant wherein prior to introduction to the ornamental indoor plant, at least one polypeptide involved in a pathway related to diffusion and/or active transport of VOCs has been modified using protein evolution.

[0029] In some embodiments, provided technologies comprise an engineered ornamental indoor plant created by crossing two engineered ornamental indoor plants. In some embodiments, provided technologies comprise an engineered ornamental plant comprising at least one heterologous formaldehyde metabolism pathway polypeptide and at least one mutation and/or transgenic vector related to stomatal flux. In some embodiments, provided technologies comprise a cell or population of cells derived from the engineered ornamental indoor plant comprising at least one heterologous BTEX metabolism polypeptide and at least one mutation and/or transgenic vector related to stomatal flux. In some embodiments, provided technologies comprise an engineered ornamental indoor plant comprising at least one heterologous formaldehyde metabolism pathway polypeptide, at least one heterologous BTEX metabolism polypeptide, and at least one mutation and/or transgenic vector related to stomatal flux.

[0030] In some embodiments, provided technologies comprise an engineered ornamental plant comprising at least one heterologous formaldehyde metabolism pathway polypeptide, and at least one mutation and/or transgenic vector related to inhibition of transgene silencing. In some embodiments, provided technologies comprise an engineered ornamental plant comprising at least one heterologous BTEX metabolism pathway polypeptide, and at least one mutation and/or transgenic vector related to inhibition of transgene silencing. In some embodiments, provided technologies comprise an engineered ornamental plant comprising at least one mutation and/or transgenic vector related to stomatal flux, and at least one mutation and/or transgenic vector related to inhibition of transgene silencing.

[0031] In some embodiments, provided technologies comprise an engineered ornamental plant comprising at least one heterologous formaldehyde metabolism pathway polypeptide, at least one mutation and/or transgenic vector related to stomatal flux, and at least one mutation and/or transgenic vector related to inhibition of transgene silencing. In some embodiments, provided technologies comprise an engineered ornamental plant comprising at least one heterologous formaldehyde metabolism pathway polypeptide, at least one heterologous BTEX metabolism polypeptide, at least one mutation and/or transgenic vector related to stomatal flux, and at least one mutation and/or transgenic vector related to inhibition of transgene silencing.

[0032] In some embodiments, provided technologies comprise a cell or population of cells derived from the engineered ornamental indoor plant as described herein.

[0033] In some embodiments, provided technologies comprise a population of engineered microbes modified to be more amenable for VOC removal and/or metabolism when compared to a population of non-engineered microbes under otherwise comparable conditions.

[0034] In some embodiments, a population of engineered microbes are primarily soil dwelling and comprise microbes of the species: Bacillus metanolcius, Ogataea methanolica, Pseudomonas putida, Phanerochaete chrysosporium, and/or Rugosibacter aromaticivorans.

[0035] In some embodiments, a population of engineered microbes are primarily leaf and/or epidermal dwelling and comprise microbes of the species: Methylobacterium oryzae, Methylobacterium extorquens, and/or Paraburkholderia phytofirmans.

[0036] In some embodiments, a population of engineered microbes are modified to metabolize formaldehyde with greater efficiency and at a greater capacity than microbes which have not been engineered. In some embodiments, a population of engineered microbes are modified to metabolize BTEX with greater efficiency and at a greater capacity than microbes which have not been engineered. In some embodiments, a population of engineered microbes are modified utilizing horizontal gene transfer from a heterologous microbe that has undergone directed evolution to increase formaldehyde and/or BTEX metabolism.

[0037] In some embodiments, a population of engineered microbes are of the species Pseudomonas putida, Methylobacterium oryzae or Methylobacterium extorquens.

[0038] In some embodiments, a population of engineered microbes are deposited on an engineered ornamental indoor plant as described herein. In some embodiments, a population of engineered microbes are deposited on an otherwise wild type ornamental indoor plant. In some embodiments, a population of engineered microbes are deposited on an engineered ornamental indoor plant. In some embodiments, a population of engineered microbe are deposited and stably colonize an engineered ornamental indoor plant.

[0039] In some embodiments, a population of engineered microbes are of the strain MoCBM20. In some embodiments, a population of engineered microbes are of the strain MePA1. In some embodiments, a population of engineered microbes are of the strain PpF1.

[0040] In some embodiments, technologies described herein comprise a plant growth system (e.g., planter) comprising: (a) at least one container comprising at least one cavity suitable for receiving plant growth media and an engineered ornamental plant, and (b) at least one air flow device engineered to provide increased airflow to an engineered ornamental plant.

[0041] In some embodiments, technologies described herein comprise a plant growth system (e.g., planter) including at least one drainage system engineered to maintain a desired rhizosphere microbiome a composition. In some embodiments, technologies described herein comprise a plant growth system with an engineered indoor ornamental plant as described herein deposited within. In some embodiments, a plant growth system comprising at least one cavity suitable for receiving plant growth media and an engineered ornamental plant and at least one air flow device engineered to provide increased airflow to an engineered ornamental plant are part of the same physical structure. In some embodiments, technologies described herein comprise at least one container designed to increase relative airflow and/or air exchange between the soil and/or microbiome and a surrounding environment when compared to a control technology. In some embodiments, technologies described herein comprise a plant growth system with at least one container designed to maximize relative airflow and/or air exchange between the soil and/or microbiome and a surrounding environment when compared to a control technology.

[0042] In some embodiments, technologies described herein comprise a method of removing at least one VOC from an environment, the method comprising cultivating at least one composition (e.g., an engineered indoor ornamental plant and/or an engineered microbe) in an environment comprising VOCs. In some embodiments, a method of removing at least one VOC from an environment comprises cultivating at least one composition (e.g., an engineered indoor ornamental plant and/or an engineered microbe) in an environment for at least 1 day.

[0043] In some embodiments, a method of removing at least one VOC from an environment comprises cultivating at least one composition (e.g., an engineered indoor ornamental plant and/or an engineered microbe) every 100 m³ of space.

[0044] In some embodiments, technologies described herein comprise a method of assessing an engineered indoor ornamental plant, microbe, plant-microbe combination, or plant-microbe-plant growth system as described herein, (a) cultivating said engineered plant in a controlled environment comprising a readily detectable and quantifiable concentration of VOCs, and (b) determining the level and rate of change in VOC levels in said controlled environment.

[0045] In some embodiments, technologies described herein comprise a method of assessing a vector encoding at least one polypeptide utilized to create an engineered ornamental indoor plant as described herein, comprising (a) expressing said vector in a cell, and (b) determining the transcriptional levels, translational levels, and molecular activity levels of said vector; wherein the step of determining the molecular activity of said vector comprises determining the level of VOC removal and/or metabolism relative to that achieved by an otherwise comparable reference cell under otherwise comparable conditions, which reference cell is not expressing or is not expressing to the same level of at least one polypeptide as the test cell.

[0046] In some embodiments, provided technologies are an oligonucleotide for use in creation of an engineered ornamental indoor plant and/or engineered microbe. In some embodiments, provided technologies relate to a method of making at least one oligonucleotide for use in creation of an engineered ornamental indoor plant and/or engineered microbe. In some embodiments, provided technologies relate to a method of making at least one engineered ornamental indoor plant comprising the introduction of at least one vector encoding at least one polypeptide. In some embodiments, provided technologies relate to a method of making at least one vector encoding at least one polypeptide utilized to create an engineered ornamental indoor plant.

### Definitions

[0047] The scope of the present disclosure is defined by the claims appended hereto and is not limited by certain embodiments described herein. Those skilled in the art, reading the present specification, will be aware of various modifications that may be equivalent to such described embodiments, or otherwise within the scope of the claims. In general, terms used herein are in accordance with their understood meaning in the art, unless clearly indicated otherwise. Explicit definitions of certain terms are provided below; meanings of these and other terms in particular instances throughout this specification will be clear to those skilled in the art from context.

[0048] Use of ordinal terms such as “first,” “second,” “third,” etc., in the claims to modify a claim element does not by itself connote any priority, precedence, or order of one claim element over another or the temporal order in which acts of a method are performed, but are used merely as labels to distinguish one claim element having a certain name from another element having a same name (but for use of the ordinal term) to distinguish the claim elements.

[0049] The articles “a” and “an,” as used herein, should be understood to include the plural referents unless clearly indicated to the contrary. Claims or descriptions that include “or” between one or more members of a group are considered satisfied if one, more than one, or all of the group members are present in, employed in, or otherwise relevant to a given product or process unless indicated to the contrary or otherwise evident from the context. In some embodiments, exactly one member of a group is present in, employed in, or otherwise relevant to a given product or process. In some embodiments, more than one, or all group members are present in, employed in, or otherwise relevant to a given product or process. It is to be understood that the present disclosure encompasses all variations, combinations, and permutations in which one or more limitations, elements, clauses, descriptive terms, etc., from one or more of the listed claims is introduced into another claim dependent on the same base claim (or, as relevant, any other claim) unless otherwise indicated or unless it would be evident to one of ordinary skill in the art that a contradiction or inconsistency would arise. Where elements are presented as lists (e.g., in Markush group or similar format), it is to be understood that each subgroup of the elements is also disclosed, and any element(s) can be removed from the group. It should be understood that, in general, where embodiments or aspects are referred to as “comprising” particular elements, features, etc., certain embodiments or aspects “consist,” or “consist essentially of,” such elements, features, etc. For purposes of simplicity, those embodiments have not in every case been specifically set forth in so many words herein. It should also be understood that any embodiment or aspect can be explicitly excluded from the claims, regardless of whether the specific exclusion is recited in the specification.

[0050] Throughout the specification, as is common practice, polynucleotide or polypeptide sequences are typically presented in 5′ to 3′ or N-terminus to C-terminus order, from left to right unless otherwise indicated.

[0051] Allele: As used herein, the term “allele” refers to one of two or more existing genetic variants of a specific polymorphic genomic locus.

[0052] Amino acid: In its broadest sense, as used herein, the term “amino acid” refers to a compound and/or substance that can be incorporated into a polypeptide chain, e.g., through formation of one or more peptide bonds. In some embodiments, an amino acid has a general structure, e.g., H₂N—C(H)(R)—COOH. In some embodiments, an amino acid is a naturally-occurring amino acid. In some embodiments, an amino acid is a non-natural amino acid; in some embodiments, an amino acid is a D-amino acid; in some embodiments, an amino acid is an L-amino acid. “Standard amino acid” refers to any of the twenty standard L-amino acids commonly found in naturally occurring peptides. “Nonstandard amino acid” refers to an amino acid, other than standard amino acids, which in some embodiments may be or have been prepared synthetically and in some embodiments may be or have been obtained from a natural source. In some embodiments, an amino acid, including a carboxy- and/or amino-terminal amino acid in a polypeptide, can contain a structural modification as compared with the general structure as shown above. For example, in some embodiments, an amino acid may be modified by methylation, amidation, acetylation, pegylation, glycosylation, phosphorylation, and/or substitution (e.g., of an amino group, a carboxylic acid group, one or more protons, and/or a hydroxyl group) as compared with a general structure. In some embodiments, such modification may, for example, alter circulating half-life of a polypeptide containing a modified amino acid as compared with one containing an otherwise identical unmodified amino acid. In some embodiments, such modification does not significantly alter a relevant activity of a polypeptide containing a modified amino acid, as compared with one containing an otherwise identical unmodified amino acid.

[0053] Approximately or About: As used herein, the terms “approximately” or “about” may be applied to one or more values of interest, including a value that is similar to a stated reference value. In some embodiments, the term “approximately” or “about” refers to a range of values that fall within ±10% (greater than or less than) of a stated reference value unless otherwise stated or otherwise evident from context (except where such number would exceed 100% of a possible value). For example, in some embodiments, the term “approximately” or “about” may encompass a range of values that within 10%, 9%, 8%, 7%, 6%, 5%, 4%, 3%, 2%, 1%, or less of a reference value.

[0054] Associated: As used herein, two or more events, conditions, or entities may be described as “associated” with one another, if the presence, level and/or form of one is correlated with that of the other. For example, a particular entity (e.g., polypeptide, genetic signature, metabolite, microbe, etc.) is considered to be associated with a particular disease, disorder, or condition, if its presence, level and/or form correlates with incidence of and/or susceptibility to the disease, disorder, or condition (e.g., across a relevant population). In some embodiments, two or more entities are physically “associated” with one another if they interact, directly or indirectly, so that they are and/or remain in physical proximity with one another. In some embodiments, two or more entities that are physically associated with one another are covalently linked to one another; in some embodiments, two or more entities that are physically associated with one another are not covalently linked to one another but are non-covalently associated, for example by means of hydrogen bonds, van der Waals interaction, hydrophobic interactions, magnetism, and combinations thereof.

[0055] Biologically active: As used herein, the term “biologically active” refers to an observable biological effect or result achieved by an agent or entity of interest. For example, in some embodiments, a specific binding interaction is a biological activity. In some embodiments, modulation (e.g., induction, enhancement, or inhibition) of a biological pathway or event is a biological activity. In some embodiments, presence or extent of a biological activity is assessed through detection of a direct or indirect product produced by a biological pathway or event of interest.

[0056] Characteristic portion: As used herein, the term “characteristic portion,” can refer to a portion of a substance whose presence (or absence) correlates with presence (or absence) of a particular feature, attribute, or activity of the substance. In some embodiments, a characteristic portion of a substance is a portion that is found in a given substance and in related substances that share a particular feature, attribute or activity, but not in those that do not share the particular feature, attribute or activity. In some embodiments, a characteristic portion shares at least one functional characteristic with the intact substance. For example, in some embodiments, a “characteristic portion” of a protein or polypeptide is one that contains a continuous stretch of amino acids, or a collection of continuous stretches of amino acids, that together are characteristic of a protein or polypeptide. In some embodiments, each such continuous stretch generally contains at least 2, 5, 10, 15, 20, 50, or more amino acids. In general, a characteristic portion of a substance (e.g., of a protein, antibody, etc.) is one that, in addition to a sequence and/or structural identity specified above, shares at least one functional characteristic with the relevant intact substance. In some embodiments, a characteristic portion may be biologically active.

[0057] Characteristic sequence element: As used herein, the phrase “characteristic sequence element” refers to a sequence element found in a polymer (e.g., in a polypeptide or nucleic acid) that represents a characteristic portion of that polymer. In some embodiments, presence of a characteristic sequence element correlates with presence or level of a particular activity or property of a polymer. In some embodiments, presence (or absence) of a characteristic sequence element defines a particular polymer as a member (or not a member) of a particular family or group of such polymers. A characteristic sequence element typically comprises at least two monomers (e.g., amino acids or nucleotides). In some embodiments, a characteristic sequence element includes at least 2, 3, 4, 5, 6, 7, 8, 9, 10, 11, 12, 13, 14, 15, 20, 25, 30, 35, 40, 45, 50, or more monomers (e.g., contiguously linked monomers). In some embodiments, a characteristic sequence element includes at least first and second stretches of contiguous monomers spaced apart by one or more spacer regions whose length may or may not vary across polymers that share a sequence element. In some embodiments, a characteristic sequence element is a sequence element that is found in all members of a family of polypeptides or nucleic acids, and therefore can be used by those of ordinary skill in the art to define members of the family.

[0058] Comparable: As used herein, the term “comparable” refers to two or more agents, entities, situations, sets of conditions, subjects, populations, etc., that may not be identical to one another but that are sufficiently similar to permit comparison there between so that one skilled in the art will appreciate that conclusions may reasonably be drawn based on differences or similarities observed. In some embodiments, comparable sets of agents, entities, situations, sets of conditions, subjects, populations, etc. are characterized by a plurality of substantially identical features and one or a small number of varied features. Those of ordinary skill in the art will understand, in context, what degree of identity is required in any given circumstance for two or more such agents, entities, situations, sets of conditions, subjects, populations, etc. to be considered comparable. For example, those of ordinary skill in the art will appreciate that sets of agents, entities, situations, sets of conditions, subjects, populations, etc. are comparable to one another when characterized by a sufficient number and type of substantially identical features to warrant a reasonable conclusion that differences in results obtained or phenomena observed under or with different sets of circumstances, stimuli, agents, entities, situations, sets of conditions, subjects, populations, etc. are caused by or indicative of the variation in those features that are varied.

[0059] Conservative: As used herein, the term “conservative” refers to instances describing a conservative amino acid substitution, including a substitution of an amino acid residue by another amino acid residue having a side chain R group with similar chemical properties (e.g., charge or hydrophobicity). In general, a conservative amino acid substitution will not substantially change functional properties of interest of a protein, for example, ability of a receptor to bind to a ligand. Examples of groups of amino acids that have side chains with similar chemical properties include: aliphatic side chains such as glycine (Gly, G), alanine (Ala, A), valine (Val, V), leucine (Leu, L), and isoleucine (Ile, I); aliphatic-hydroxyl side chains such as serine (Ser, S) and threonine (Thr, T); amide-containing side chains such as asparagine (Asn, N) and glutamine (Gln, Q); aromatic side chains such as phenylalanine (Phe, F), tyrosine (Tyr, Y), and tryptophan (Trp, W); basic side chains such as lysine (Lys, K), arginine (Arg, R), and histidine (His, H); acidic side chains such as aspartic acid (Asp, D) and glutamic acid (Glu, E); and sulfur-containing side chains such as cysteine (Cys, C) and methionine (Met, M). Conservative amino acids substitution groups include, for example, valine/leucine/isoleucine (Val/Leu/Ile, V/L/I), phenylalanine/tyrosine (Phe/Tyr, F/Y), lysine/arginine (Lys/Arg, K/R), alanine/valine (Ala/Val, A/V), glutamate/aspartate (Glu/Asp, E/D), and asparagine/glutamine (Asn/Gln, N/Q). In some embodiments, a conservative amino acid substitution can be a substitution of any native residue in a protein with alanine, as used in, for example, alanine scanning mutagenesis. In some embodiments, a conservative substitution is made that has a positive value in the PAM250 log-likelihood matrix disclosed in Gonnet, G. H. et al., 1992, Science 256:1443-1445, which is incorporated herein by reference in its entirety. In some embodiments, a substitution is a moderately conservative substitution wherein the substitution has a nonnegative value in the PAM250 log-likelihood matrix. One skilled in the art would appreciate that a change (e.g., substitution, addition, deletion, etc.) of amino acids that are not conserved between the same protein from different species is less likely to have an effect on the function of a protein and therefore, these amino acids should be selected for mutation. Amino acids that are conserved between the same protein from different species should not be changed (e.g., deleted, added, substituted, etc.), as these mutations are more likely to result in a change in function of a protein.

EXEMPLARY CONSERVATIVE AMINO
ACID SUBSTITUTIONS

| For Amino | | |
|---|---|---|
| Acid | Code | Replace With |
| Alanine | A | D-ala, Gly, Aib, β-Ala, Acp, L-Cys, D-Cys |
| Arginine | R | D-Arg, Lys, D-Lys, homo-Arg, D-homo-Arg, |
| | | Met, Ile, D-Met, D-Ile, Orn, D-Orn |
| Asparagine | N | D-Asn, Asp, D-Asp, Glu, D-Glu, Gln, D-Gln |
| Aspartic Acid | D | D-Asp, D-Asn, Asn, Glu, D-Glu, Gln, D-Gln |
| Cysteine | C | D-Cys, S-Me-Cys, Met, D-Met, Thr, D-Thr |
| Glutamine | Q | D-Gln, Asn, D-Asn, Glu, D-Glu, Asp, D-Asp |
| Glutamic Acid | E | D-Glu, D-Asp, Asp, Asn, D-Asn, Gln, D-Gln |
| Glycine | G | Ala, D-Ala, Pro, D-Pro, Aib, B-Ala, Acp |
| Isoleucine | I | D-Ile, Val, D-Val, AdaA, AdaG, Leu, D-Leu, |
| | | Met, D-Met |
| Leucine | L | D-Leu, Val, D-Val, AdaA, AdaG, Leu, D-Leu, |
| | | Met, D-Met |
| Lysine | K | D-Lys, Arg, D-Arg, homo-Arg, D-homo-Arg, |
| | | Met, D-Met, Ile, D-Ile, Orn, D-Orn |
| Methionine | M | D-Met, S-Me-Cys, Ile, D-Ile, Leu, D-Leu, Val, |
| | | D-Val |
| Phenylalanine | F | D-Phe, Tyr, D-Thr, L-Dopa, His, D-His, Trp, |
| | | D-Trp, Trans-3,4 or 5-phenylproline, AdaA, |
| | | AdaG, cis-3,4 or 5-phenylproline, Bpa, D-Bpa |
| Proline | P | D-Pro, L-I-thioazolidine-4-carboxylic acid, |
| | | D-or-L-1-oxazolidine-4-carboxylic acid (Kauer, |
| | | U.S. Pat. No. 4,511,390) |
| Serine | S | D-Ser, Thr, D-Thr, allo-Thr, Met, D-Met, Met |
| | | (O), D-Met (O), L-Cys, D-Cys |
| Threonine | T | D-Thr, Ser, D-Ser, allo-Thr, Met, D-Met, Met |
| | | (O), D-Met (O), Val, D-Val |
| Tyrosine | Y | D-Tyr, Phe, D-Phe, L-Dopa, His, D-His |
| Valine | V | D-Val, Leu, D-Leu, Ile, D-Ile, Met, D-Met, |
| | | AdaA, AdaG |

[0060] Control: As used herein, the term “control” refers to the art-understood meaning of a “control” being a standard or reference against which results are compared. Typically, controls are used to augment integrity in experiments by isolating variables in order to make a conclusion about such variables. In some embodiments, a control is a reaction or assay that is performed simultaneously with a test reaction or assay to provide a comparator. For example, in one experiment, a “test” (i.e., a variable being tested) is applied. In a second experiment, a “control,” the variable being tested is not applied. In some embodiments, a control is a historical control (e.g., of a test or assay performed previously, or an amount or result that is previously known). In some embodiments, a control is or comprises a printed or otherwise saved record. In some embodiments, a control is a positive control. In some embodiments, a control is a negative control.

[0061] Determining, measuring, evaluating, assessing, assaying and analyzing: As used herein, the terms “determining,” “measuring,” “evaluating,” “assessing,” “assaying,” and “analyzing” may be used interchangeably to refer to any form of measurement, and include determining if an element is present or not. These terms include both quantitative and/or qualitative determinations. Assaying may be relative or absolute. For example, in some embodiments, “Assaying for the presence of” can be determining an amount of something present and/or determining whether or not it is present or absent.

[0062] Engineered: In general, as used herein, the term “engineered” refers to an aspect of having been manipulated by the hand of man. For example, in some embodiments, a cell or organism may be considered to be “engineered” if it has been manipulated so that its genetic information is altered (e.g., new genetic material not previously present has been introduced, for example by transformation, mating, somatic hybridization, transfection, transduction, or other mechanism, or previously present genetic material is altered or removed, for example by substitution or deletion mutation, or by mating protocols). As is common practice and is understood by those in the art, progeny of an engineered polynucleotide or cell are typically still referred to as “engineered” even though the actual manipulation was performed on a prior entity. In some embodiments, a cell or organism may be considered to be “engineered” if it has been handled or cultivated in a manner involving one or more interventions by man.

[0063] Expression: As used herein, the term “expression” of a nucleic acid sequence refers to generation of any gene product (e.g., transcript, e.g., mRNA, e.g., polypeptide, etc.) from a nucleic acid sequence. In some embodiments, a gene product can be a transcript. In some embodiments, a gene product can be a polypeptide. In some embodiments, expression of a nucleic acid sequence involves one or more of the following: (1) production of an RNA template from a DNA sequence (e.g., by transcription); (2) processing of an RNA transcript (e.g., by splicing, editing, 5′ cap formation, and/or 3′ end formation); (3) translation of an RNA into a polypeptide or protein; and/or (4) post-translational modification of a polypeptide or protein.

[0064] Functional: As used herein, the term “functional” describes something that exists in a form in which it exhibits a property and/or activity by which it is characterized. For example, in some embodiments, a “functional” biological molecule is a biological molecule in a form in which it exhibits a property and/or activity by which it is characterized. In some such embodiments, a functional biological molecule is characterized relative to another biological molecule which is non-functional in that the “non-functional” version does not exhibit the same or equivalent property and/or activity as the “functional” molecule. A biological molecule may have one function, two functions (i.e., bifunctional) or many functions (i.e., multifunctional).

[0065] Gene: As used herein, the term “gene” refers to a DNA sequence in a chromosome that codes for a gene product (e.g., an RNA product, e.g., a polypeptide product). In some embodiments, a gene includes coding sequence (i.e., sequence that encodes a particular product). In some embodiments, a gene includes non-coding sequence. In some particular embodiments, a gene may include both coding (e.g., exonic) and non-coding (e.g., intronic) sequence. In some embodiments, a gene may include one or more regulatory sequences (e.g., promoters, enhancers, etc.) and/or intron sequences that, for example, may control or impact one or more aspects of gene expression (e.g., cell-type-specific expression, inducible expression, etc.). As used herein, the term “gene” generally refers to a portion of a nucleic acid that encodes a polypeptide or fragment thereof; the term may optionally encompass regulatory sequences, as will be clear from context to those of ordinary skill in the art. This definition is not intended to exclude application of the term “gene” to non-protein-coding expression units but rather to clarify that, in most cases, the term as used in this document refers to a polypeptide-coding nucleic acid. In some embodiments, a gene may encode a polypeptide, but that polypeptide may not be functional, e.g., a gene variant may encode a polypeptide that does not function in the same way, or at all, relative to the wild-type gene. In some embodiments, a gene may encode a transcript which, in some embodiments, may be toxic beyond a threshold level. In some embodiments, a gene may encode a polypeptide, but that polypeptide may not be functional and/or may be toxic beyond a threshold level.

[0066] Heterologous: The term “heterologous”, as used herein to refer to an entity (e.g., a gene or polypeptide) that is present in a different source, in a different arrangement, and/or in a different condition or state from that in which it is presently found. To give but one example, in some embodiments, a gene or polypeptide that is not naturally found in a particular organism is considered to be heterologous to that organism. Alternatively or additionally, in some embodiments, a gene or polypeptide that is not naturally found in a particular cell may be considered to be heterologous to that cell if introduced into it (e.g., via a vector), even if that gene or polypeptide might naturally be found in a different cell of the same type. In some embodiments, a vector may be considered to be heterologous to a cell when it has been introduced into the cell, and/or a copy of a gene included in such vector may be considered to be heterologous to that particular cell even if an endogenous copy of the same gene exists in the cell. Where a plurality of different heterologous polypeptides are to be introduced into and/or expressed by a host cell, different polypeptides may be from different source organisms, or from the same source organism. To give but one example, in some cases, individual polypeptides may represent individual subunits of a complex protein activity and/or may be required to work in concert with other polypeptides in order to achieve the goals of the present invention. In some embodiments, it will often be desirable for such polypeptides to be from the same source organism, and/or to be sufficiently related to function appropriately when expressed together in a host cell. In some embodiments, such polypeptides may be from different, even unrelated source organisms. It will further be understood that, where a heterologous polypeptide is to be expressed in a host cell, it will often be desirable to utilize nucleic acid sequences encoding the polypeptide that have been adjusted to accommodate codon preferences of the host cell and/or to link the encoding sequences with regulatory elements active in the host cell. For example, when the host cell is a Araceae family member (e.g., Epipremnum aureum), it will often be desirable to alter the gene sequence encoding a given polypeptide such that it conforms more closely with the codon preferences of such a Araceae family member. In certain embodiments, a gene sequence encoding a given polypeptide is altered to conform more closely with the codon preference of a species related to the host cell. For example, when the host cell is a Proteobacteria phylum member (e.g., Methylobacterium), it will often be desirable to alter the gene sequence encoding a given polypeptide such that it conforms more closely with the codon preferences of a related bacterial strain. Such embodiments are advantageous when the gene sequence encoding a given polypeptide is difficult to optimize to conform to the codon preference of the host cell due to experimental (e.g., cloning) and/or other reasons. In certain embodiments, the gene sequence encoding a given polypeptide is optimized even when such a gene sequence is derived from the host cell itself (and thus is not heterologous). For example, a gene sequence encoding a polypeptide of interest may not be codon optimized for expression in a given host cell even though such a gene sequence is isolated from the host cell strain. In such embodiments, the gene sequence may be further optimized to account for codon preferences of the host cell. Those of ordinary skill in the art will be aware of host cell codon preferences and will be able to employ inventive methods and compositions disclosed herein to optimize expression of a given polypeptide in the host cell.

[0067] Host Cell: As used herein, the “host cell” is a cell (e.g., a plant, fungal, or bacterial cell) that is manipulated according to the present invention, e.g., to receive a vector. In some instances, the term “modified host cell” may be used to refer to a host cell which has been modified, engineered, or manipulated in accordance with the present invention as compared with a parental cell (which may, in some embodiments, be a naturally occurring parental cell or, in other embodiments, may be a parental cell that itself has been engineered or manipulated, including as a host cell). Persons of skill upon reading this disclosure will understand that such terms typically refer not only to the particular subject cell, but also to the progeny of such a cell. Because certain modifications may occur in succeeding generations due to either mutation or environmental influences, such progeny may not, in fact, be identical to the parent cell, but are still included within the scope of the term “host cell” as used herein.

[0068] Identity: As used herein, the term “identity” refers to overall relatedness between polymeric molecules, e.g., between nucleic acid molecules (e.g., DNA molecules and/or RNA molecules) and/or between polypeptide molecules. In some embodiments, polymeric molecules are considered to be “substantially identical” to one another if their sequences are at least 25%, 30%, 35%, 40%, 45%, 50%, 55%, 60%, 65%, 70%, 75%, 80%, 85%, 90%, 95%, or 99% identical. Calculation of percent identity of two nucleic acid or polypeptide sequences, for example, can be performed by aligning two sequences for optimal comparison purposes (e.g., gaps can be introduced in one or both of a first and a second sequences for optimal alignment and non-identical sequences can be disregarded for comparison purposes). In some embodiments, a length of a sequence aligned for comparison purposes is at least 30%, at least 40%, at least 50%, at least 60%, at least 70%, at least 80%, at least 90%, at least 95%, or substantially 100% of length of a reference sequence; nucleotides at corresponding positions are then compared. When a position in the first sequence is occupied by the same residue (e.g., nucleotide or amino acid) as a corresponding position in the second sequence, then the two molecules (i.e., first and second) are identical at that position. Percent identity between two sequences is a function of the number of identical positions shared by the two sequences being compared, taking into account the number of gaps, and the length of each gap, which needs to be introduced for optimal alignment of the two sequences. Comparison of sequences and determination of percent identity between two sequences can be accomplished using a mathematical algorithm. For example, percent identity between two nucleotide sequences can be determined using the algorithm of Meyers and Miller (CABIOS, 1989, 4:11-17, which is herein incorporated by reference in its entirety), which has been incorporated into the ALIGN program (version 2.0). In some embodiments, nucleic acid sequence comparisons made with the ALIGN program use a PAM120 weight residue table, a gap length penalty of 12 and a gap penalty of 4.

[0069] Isolated: As used herein, the term “isolated”, means that the isolated entity has been separated from at least one component with which it was previously associated. When most other components have been removed, the isolated entity is “purified” or “concentrated”. Isolation and/or purification and/or concentration may be performed using any techniques known in the art including, for example, fractionation, extraction, precipitation, or other separation.

[0070] Improve, increase, enhance, inhibit or reduce: As used herein, the terms “improve,” “increase,” “enhance,” “inhibit,” “reduce,” or grammatical equivalents thereof, indicate values that are relative to a baseline or other reference measurement. In some embodiments, a value is statistically significantly difference that a baseline or other reference measurement. In some embodiments, an appropriate reference measurement may be or comprise a measurement in a particular system (e.g., in a single subject) under otherwise comparable conditions absent presence of (e.g., prior to and/or after) a particular agent or treatment, or in presence of an appropriate comparable reference agent. In some embodiments, an appropriate reference measurement may be or comprise a measurement in comparable system known or expected to respond in a particular way, in presence of the relevant agent or treatment. In some embodiments, an appropriate reference is a negative reference; in some embodiments, an appropriate reference is a positive reference.

[0071] Nucleic acid: As used herein, the term “nucleic acid”, in its broadest sense, refers to any compound and/or substance that is or can be incorporated into an oligonucleotide chain. In some embodiments, a nucleic acid is a compound and/or substance that is or can be incorporated into an oligonucleotide chain via a phosphodiester linkage. As will be clear from context, in some embodiments, “nucleic acid” refers to an individual nucleic acid residue (e.g., a nucleotide and/or nucleoside); in some embodiments, “nucleic acid” refers to an oligonucleotide chain comprising individual nucleic acid residues. In some embodiments, a “nucleic acid” is or comprises RNA; in some embodiments, a “nucleic acid” is or comprises DNA. In some embodiments, a nucleic acid is, comprises, or consists of one or more natural nucleic acid residues. In some embodiments, a nucleic acid is, comprises, or consists of one or more nucleic acid analogs. In some embodiments, a nucleic acid analog differs from a nucleic acid in that it does not utilize a phosphodiester backbone. Alternatively or additionally, in some embodiments, a nucleic acid has one or more phosphorothioate and/or 5′-N-phosphoramidite linkages rather than phosphodiester bonds. In some embodiments, a nucleic acid is, comprises, or consists of one or more natural nucleosides (e.g., adenosine, thymidine, guanosine, cytidine, uridine, deoxyadenosine, deoxythymidine, deoxy guanosine, and deoxycytidine). In some embodiments, a nucleic acid is, comprises, or consists of one or more nucleoside analogs (e.g., 2-aminoadenosine, 2-thiothymidine, inosine, pyrrolo-pyrimidine, 3-methyl adenosine, 5-methylcytidine, C-5 propynyl-cytidine, C-5 propynyl-uridine, 2-aminoadenosine, C5-bromouridine, C5-fluorouridine, C5-iodouridine, C5-propynyl-uridine, C5-propynyl-cytidine, C5-methylcytidine, 2-aminoadenosine, 7-deazaadenosine, 7-deazaguanosine, 8-oxoadenosine, 8-oxoguanosine, 0(6)-methylguanine, 2-thiocytidine, methylated bases, intercalated bases, and combinations thereof). In some embodiments, a nucleic acid comprises one or more modified sugars (e.g., 2′-fluororibose, ribose, 2′-deoxyribose, arabinose, and hexose) as compared with those in natural nucleic acids. In some embodiments, a nucleic acid has a nucleotide sequence that encodes a functional gene product such as an RNA or protein. In some embodiments, a nucleic acid includes one or more introns. In some embodiments, nucleic acids are prepared by one or more of isolation from a natural source, enzymatic synthesis by polymerization based on a complementary template (in vivo or in vitro), reproduction in a recombinant cell or system, and chemical synthesis. In some embodiments, a nucleic acid is at least 3, 4, 5, 6, 7, 8, 9, 10, 15, 20, 25, 30, 35, 40, 45, 50, 55, 60, 65, 70, 75, 80, 85, 90, 95, 100, 110, 120, 130, 140, 150, 160, 170, 180, 190, 20, 225, 250, 275, 300, 325, 350, 375, 400, 425, 450, 475, 500, 600, 700, 800, 900, 1000, 1500, 2000, 2500, 3000, 3500, 4000, 4500, 5000 or more residues long. In some embodiments, a nucleic acid is partly or wholly single stranded; in some embodiments, a nucleic acid is partly or wholly double stranded. In some embodiments, a nucleic acid has a nucleotide sequence comprising at least one element that encodes, or is complementary to a sequence that encodes, a polypeptide. In some embodiments, a nucleic acid has enzymatic activity.

[0072] Operably linked: As used herein, refers to a juxtaposition wherein the components described are in a relationship permitting them to function in their intended manner. A control element “operably linked” to a functional element is associated in such a way that expression and/or activity of the functional element is achieved under conditions compatible with the control element. In some embodiments, “operably linked” control elements are contiguous (e.g., covalently linked) with coding elements of interest; in some embodiments, control elements act in trans to or otherwise at a from the functional element of interest. In some embodiments, “operably linked” refers to functional linkage between a regulatory sequence and a heterologous nucleic acid sequence resulting in expression of the latter. For example, a first nucleic acid sequence is operably linked with a second nucleic acid sequence when the first nucleic acid sequence is placed in a functional relationship with the second nucleic acid sequence. In some embodiments, for example, a functional linkage may include transcriptional control. For instance, a promoter is operably linked to a coding sequence if the promoter affects the transcription or expression of the coding sequence. Operably linked DNA sequences can be contiguous with each other and, e.g., where necessary to join two protein coding regions, are in the same reading frame.

[0073] Pathogenic: Those skilled in the art will appreciate that the term “pathogenic” generally refers to an ability to or character of causing disease. In some embodiments, a particular organism or condition may be characterized as or understood to be pathogenic if its presence under relevant circumstances creates a significant and relevant risk of disease to individual(s) who may be present in and/or exposed to the circumstances. Thus, in some embodiments, as will be understood in the art, “pathogenicity” of a particular organism may be impacted by one or more features or elements of context (e.g., amount of organism, size of space, probability of co-localization of organism and potentially susceptible individual, degree of filtration and/or airflow, etc). Alternatively, in some embodiments, an organism may be considered to be “pathogenic” if a material risk of disease would exist if a potentially susceptible individual were exposed to the organism, e.g., under particular standard or experimental or reference conditions.

[0074] Phytosphere: The term “phytosphere” will be understood by those skilled in the art to refer to the ecosystem of a plant (e.g., the interior and/or exterior of a plant). In some embodiments, a phytosphere may be or comprise one or more of a phyllosphere, endosphere, and/or rhizosphere.

[0075] Polyadenylation: As used herein, “polyadenylation” refers to the covalent linkage of a polyadenylyl moiety, or its modified variant, to a messenger RNA molecule. In eukaryotic organisms, most messenger RNA (mRNA) molecules are polyadenylated at the 3′ end. In some embodiments, a 3′ poly(A) tail is a long sequence of adenine nucleotides (e.g., 50, 60, 70, 100, 200, 500, 1000, 2000, 3000, 4000, or 5000) added to the pre-mRNA through the action of an enzyme, polyadenylate polymerase. In higher eukaryotes, a poly(A) tail can be added onto transcripts that contain a specific sequence, the polyadenylation signal or “poly(A) sequence.” A poly(A) tail and proteins bound to it aid in protecting mRNA from degradation by exonucleases. Polyadenylation can be affect transcription termination, export of the mRNA from the nucleus, and translation. Typically, polyadenylation occurs in the nucleus immediately after transcription of DNA into RNA, but additionally can also occur later in the cytoplasm. After transcription has been terminated, the mRNA chain can be cleaved through the action of an endonuclease complex associated with RNA polymerase. The cleavage site can be characterized by the presence of the base sequence AAUAAA near the cleavage site. After mRNA has been cleaved, adenosine residues can be added to the free 3′ end at the cleavage site. As used herein, a “poly(A) sequence” is a sequence that triggers the endonuclease cleavage of an mRNA and the additional of a series of adenosines to the 3′ end of the cleaved mRNA.

[0076] Polypeptide: As used herein refers to a polymeric chain of amino acids. In some embodiments, a polypeptide has an amino acid sequence that occurs in nature. In some embodiments, a polypeptide has an amino acid sequence that does not occur in nature. In some embodiments, a polypeptide has an amino acid sequence that is engineered in that it is designed and/or produced through action of the hand of man. In some embodiments, a polypeptide may comprise or consist of natural amino acids, non-natural amino acids, or both. In some embodiments, a polypeptide may comprise or consist of only natural amino acids or only non-natural amino acids. In some embodiments, a polypeptide may comprise D-amino acids, L-amino acids, or both. In some embodiments, a polypeptide may comprise only D-amino acids. In some embodiments, a polypeptide may comprise only L-amino acids. In some embodiments, a polypeptide may include one or more pendant groups or other modifications, e.g., modifying or attached to one or more amino acid side chains, at the polypeptide's N-terminus, at the polypeptide's C-terminus, or any combination thereof. In some embodiments, such pendant groups or modifications may be selected from the group consisting of acetylation, amidation, lipidation, methylation, pegylation, etc., including combinations thereof. In some embodiments, a polypeptide may be cyclic, and/or may comprise a cyclic portion. In some embodiments, a polypeptide is not cyclic and/or does not comprise any cyclic portion. In some embodiments, a polypeptide is linear. In some embodiments, a polypeptide may be or comprise a stapled polypeptide. In some embodiments, the term “polypeptide” may be appended to a name of a reference polypeptide, activity, or structure; in such instances it is used herein to refer to polypeptides that share the relevant activity or structure and thus can be considered to be members of the same class or family of polypeptides. For each such class, the present specification provides and/or those skilled in the art will be aware of exemplary polypeptides within the class whose amino acid sequences and/or functions are known; in some embodiments, such exemplary polypeptides are reference polypeptides for the polypeptide class or family. In some embodiments, a member of a polypeptide class or family shows significant sequence homology or identity with, shares a common sequence motif (e.g., a characteristic sequence element) with, and/or shares a common activity (in some embodiments at a comparable level or within a designated range) with a reference polypeptide of the class; in some embodiments with all polypeptides within the class). For example, in some embodiments, a member polypeptide shows an overall degree of sequence homology or identity with a reference polypeptide that is at least about 30-40%, and is often greater than about 50%, 60%, 70%, 80%, 90%, 91%, 92%, 93%, 94%, 95%, 96%, 97%, 98%, 99% or more and/or includes at least one region (e.g., a conserved region that may in some embodiments be or comprise a characteristic sequence element) that shows very high sequence identity, often greater than 90% or even 95%, 96%, 97%, 98%, or 99%. Such a conserved region usually encompasses at least 3-4 and often up to 20 or more amino acids; in some embodiments, a conserved region encompasses at least one stretch of at least 2, 3, 4, 5, 6, 7, 8, 9, 10, 11, 12, 13, 14, 15 or more contiguous amino acids. In some embodiments, a relevant polypeptide may comprise or consist of a fragment of a parent polypeptide. In some embodiments, a useful polypeptide as may comprise or consist of a plurality of fragments, each of which is found in the same parent polypeptide in a different spatial arrangement relative to one another than is found in the polypeptide of interest (e.g., fragments that are directly linked in the parent may be spatially separated in the polypeptide of interest or vice versa, and/or fragments may be present in a different order in the polypeptide of interest than in the parent), so that the polypeptide of interest is a derivative of its parent polypeptide.

[0077] Polynucleotide: As used herein, the term “polynucleotide” refers to a polymeric chain of nucleic acids. In some embodiments, a polynucleotide is or comprises RNA; in some embodiments, a polynucleotide is or comprises DNA. In some embodiments, a polynucleotide is, comprises, or consists of one or more natural nucleic acid residues. In some embodiments, a polynucleotide is, comprises, or consists of one or more nucleic acid analogs. In some embodiments, a polynucleotide analog differs from a nucleic acid in that it does not utilize a phosphodiester backbone. Alternatively or additionally, in some embodiments, a polynucleotide has one or more phosphorothioate and/or 5′-N-phosphoramidite linkages rather than phosphodiester bonds. In some embodiments, a polynucleotide is, comprises, or consists of one or more natural nucleosides (e.g., adenosine, thymidine, guanosine, cytidine, uridine, deoxyadenosine, deoxythymidine, deoxy guanosine, and deoxycytidine). In some embodiments, a polynucleotide is, comprises, or consists of one or more nucleoside analogs (e.g., 2-aminoadenosine, 2-thiothymidine, inosine, pyrrolo-pyrimidine, 3-methyl adenosine, 5-methylcytidine, C-5 propynyl-cytidine, C-5 propynyl-uridine, 2-aminoadenosine, C5-bromouridine, C5-fluorouridine, C5-iodouridine, C5-propynyl-uridine, C5-propynyl-cytidine, C5-methylcytidine, 2-aminoadenosine, 7-deazaadenosine, 7-deazaguanosine, 8-oxoadenosine, 8-oxoguanosine, 0(6)-methylguanine, 2-thiocytidine, methylated bases, intercalated bases, and combinations thereof). In some embodiments, a polynucleotide comprises one or more modified sugars (e.g., 2′-fluororibose, ribose, 2′-deoxyribose, arabinose, and hexose) as compared with those in natural nucleic acids. In some embodiments, a polynucleotide has a nucleotide sequence that encodes a functional gene product such as an RNA or protein. In some embodiments, a polynucleotide includes one or more introns. In some embodiments, a polynucleotide is prepared by one or more of isolation from a natural source, enzymatic synthesis by polymerization based on a complementary template (in vivo or in vitro), reproduction in a recombinant cell or system, and chemical synthesis. In some embodiments, a polynucleotide is at least 3, 4, 5, 6, 7, 8, 9, 10, 15, 20, 25, 30, 35, 40, 45, 50, 55, 60, 65, 70, 75, 80, 85, 90, 95, 100, 110, 120, 130, 140, 150, 160, 170, 180, 190, 20, 225, 250, 275, 300, 325, 350, 375, 400, 425, 450, 475, 500, 600, 700, 800, 900, 1000, 1500, 2000, 2500, 3000, 3500, 4000, 4500, 5000 or more residues long. In some embodiments, a polynucleotide is partly or wholly single stranded; in some embodiments, a polynucleotide is partly or wholly double stranded. In some embodiments, a polynucleotide has a nucleotide sequence comprising at least one element that encodes, or is the complement of a sequence that encodes, a polypeptide. In some embodiments, a polynucleotide has enzymatic activity.

[0078] Protein: As used herein, the term “protein” refers to a polypeptide (i.e., a string of at least two amino acids linked to one another by peptide bonds). Proteins may include moieties other than amino acids (e.g., may be glycoproteins, proteoglycans, etc.) and/or may be otherwise processed or modified. Those of ordinary skill in the art will appreciate that a “protein” can be a complete polypeptide chain as produced by a cell (with or without a signal sequence), or can be a characteristic portion thereof. Those of ordinary skill will appreciate that a protein can sometimes include more than one polypeptide chain, for example linked by one or more disulfide bonds or associated by other means.

[0079] Recombinant: As used herein, the term “recombinant” is intended to refer to polypeptides that are designed, engineered, prepared, expressed, created, manufactured, and/or or isolated by recombinant means, such as polypeptides expressed using a recombinant expression vector transfected into a host cell; polypeptides isolated from a recombinant, combinatorial human polypeptide library; polypeptides isolated from an animal (e.g., a mouse, rabbit, sheep, fish, etc.) that is transgenic for or otherwise has been manipulated to express a gene or genes, or gene components that encode and/or direct expression of the polypeptide or one or more component(s), portion(s), element(s), or domain(s) thereof; and/or polypeptides prepared, expressed, created or isolated by any other means that involves splicing or ligating selected nucleic acid sequence elements to one another, chemically synthesizing selected sequence elements, and/or otherwise generating a nucleic acid that encodes and/or directs expression of a polypeptide or one or more component(s), portion(s), element(s), or domain(s) thereof. In some embodiments, one or more of such selected sequence elements is found in nature. In some embodiments, one or more of such selected sequence elements is designed in silico. In some embodiments, one or more such selected sequence elements results from mutagenesis (e.g., in vivo or in vitro) of a known sequence element, e.g., from a natural or synthetic source such as, for example, in the germline of a source organism of interest (e.g., of an ornamental indoor plant, microbiome component, etc).

[0080] Reference: As used herein, the term “reference” describes a standard or control relative to which a comparison is performed. For example, in some embodiments, an agent, animal, individual, population, sample, sequence or value of interest is compared with a reference or control agent, animal, individual, population, sample, sequence or value. In some embodiments, a reference or control is tested and/or determined substantially simultaneously with the testing or determination of interest. In some embodiments, a reference or control is a historical reference or control, optionally embodied in a tangible medium. Typically, as would be understood by those skilled in the art, a reference or control is determined or characterized under comparable conditions or circumstances to those under assessment. Those skilled in the art will appreciate when sufficient similarities are present to justify reliance on and/or comparison to a particular possible reference or control. In some embodiments, a reference is a negative control reference; in some embodiments, a reference is a positive control reference.

[0081] Regulatory Element: As used herein, the term “regulatory element” or “regulatory sequence” refers to a non-coding region of a nucleic acid (e.g., DNA) that regulates one or more aspects of expression of one or more particular genes. In some embodiments, a regulatory element may act in cis with a gene it regulates. In some embodiments, a regulatory element may act in trans with a gene it regulates. In some embodiments, a regulatory element is apposed to or “in the neighborhood” of a gene that it regulates. In some embodiments, a regulatory element, even if in cis with a gene it regulates, is distinct from the gene. In some embodiments, a regulatory element impairs or enhances transcription of one or more genes. In some embodiments, a regulatory sequence refers to a nucleic acid sequence which is regulates expression of a gene product operably linked to a regulatory sequence. In some such embodiments, this sequence may be an enhancer sequence and other regulatory elements which regulate expression of a gene product.

[0082] Sample: As used herein, the term “sample” typically refers to an aliquot of material obtained or derived from a source of interest. In some embodiments, a source of interest is a biological or environmental source. In some embodiments, a source of interest may be or comprise a cell or an organism, such as a microbe (e.g., virus), a plant, or an animal (e.g., a human). In some embodiments, a source of interest is or comprises biological tissue or fluid. In some embodiments, a biological fluid may be or comprise an intracellular fluid, an extracellular fluid, an intravascular fluid, an interstitial fluid, a lymphatic fluid, and/or a transcellular fluid. In some embodiments, a biological fluid may be or comprise a plant exudate. In some embodiments, a biological tissue or sample may be obtained, for example, by aspirate, biopsy (e.g., fine needle or tissue biopsy), swab, scraping, surgery, washing or lavage. In some embodiments, a biological sample is or comprises cells obtained from an individual. In some embodiments, a sample is a “primary sample” obtained directly from a source of interest by any appropriate means. In some embodiments, as will be clear from context, the term “sample” refers to a preparation that is obtained by processing (e.g., by removing one or more components of and/or by adding one or more agents to) a primary sample. For example, filtering using a semi-permeable membrane. Such a “processed sample” may comprise, for example nucleic acids or proteins extracted from a sample or obtained by subjecting a primary sample to one or more techniques such as amplification or reverse transcription of nucleic acid, isolation and/or purification of certain components, etc.

[0083] Source organism: The term “source organism”, as used herein, refers to the organism in which a particular agent (e.g., a particular nucleic acid, polypeptide, etc.) can be found in nature. Thus, for example, if one or more heterologous polypeptides is/are being expressed in a host organism, the organism in which the polypeptides are expressed in nature (and/or from which their genes were originally cloned) may be referred to as the “source organism”. Where multiple heterologous polypeptides are being expressed in a host organism, one or more source organism(s) may be utilized for independent selection of each of the heterologous polypeptide(s). It will be appreciated that any and all organisms that naturally contain relevant polypeptide sequences may be used as source organisms in accordance with the present invention. In certain embodiments, representative source organisms may be or include, for example, one or more of animal (e.g., mammal, reptile, fish, bird, insect, etc), plant, microbial (e.g., fungal (e.g., yeast), algal, bacterial [e.g., cyanobacterial, archaebacterial, etc] protozoal, etc) source organisms.

[0084] Stomatal Flux: As used herein, the term “stomatal flux” refers to the cycling of a stoma opening, from open-to-closed, or closed-to-open. Stomatal flux may also refer to the propensity for the stoma to appear in one state or the other, e.g., open or closed.

[0085] Subject: As used herein, the term “subject” refers an organism (e.g., a plant, a microbe, etc). In many embodiments, where a subject is a plant, it may be an indoor plant, e.g., an ornamental indoor plant. In some embodiments, a plant subject may be in seed form. In some embodiments, a subject can be manipulated (e.g., engineered), for example to better serve a specific purpose.

[0086] Substantially: As used herein, the term “substantially” refers to a qualitative condition of exhibiting total or near-total extent or degree of a characteristic or property of interest. One of ordinary skill in the art will understand that biological and chemical phenomena rarely, if ever, go to completion and/or proceed to completeness or achieve or avoid an absolute result. The term “substantially” is therefore used herein to capture a potential lack of completeness inherent in many biological and chemical phenomena.

[0087] Variant: As used herein, the term “variant” refers to a version of something, e.g., a gene sequence, that is different, in some way, from another version. To determine if something is a variant, a reference version is typically chosen and a variant is different relative to that reference version. In some embodiments, a variant can have the same or a different (e.g., increased or decreased) level of activity or functionality than a wild type sequence. For example, in some embodiments, a variant can have improved functionality as compared to a wild-type sequence if it is, e.g., codon-optimized to resist degradation, e.g., by an inhibitory nucleic acid, e.g., miRNA. Such a variant is referred to herein as a gain-of-function variant. In some embodiments, a variant has a reduction or elimination in activity or functionality or a change in activity that results in a negative outcome. Such a variant is referred to herein as a loss-of-function variant. In some embodiments, a gain-of-function variant is a codon-optimized sequence which encodes a transcript or polypeptide that may have improved properties (e.g., less susceptibility to degradation, e.g., less susceptibility to miRNA mediated degradation) than its corresponding wild type (e.g., non-codon optimized) version. In some embodiments, a loss-of-function variant has one or more changes that result in a transcript or polypeptide that is defective in some way (e.g., decreased function, non-functioning) relative to the wild type transcript and/or polypeptide.

[0088] Vector: As used herein, the term “vector” refers to a nucleic acid capable of carrying (e.g., into a cell) at least one heterologous polynucleotide with which it has been linked. In some embodiments, a vector can be or comprise a plasmid, a transposon, a cosmid, an artificial chromosome (e.g., a human artificial chromosome (HAC), a yeast artificial chromosome (YAC), a bacterial artificial chromosome (BAC), a P1-derived artificial chromosome (PAC)), a viral vector, a Gateway® plasmid, etc. In certain embodiments, a vector may include sufficient cis-acting elements for expression; alternatively or additionally, elements for expression can be supplied by a cell or system into which the vector is introduced. In some embodiments, a vector may include one or more genetic elements (e.g., origin of replication, primer binding site, etc.) sufficient to achieve replication of the vector in a relevant cell or system. In some embodiments (e.g., bacterial vectors having a bacterial origin of replication and episomal mammalian vectors), a vector may be capable of autonomous replication in a cell or system into which it is introduced. Other vectors (e.g., non-episomal mammalian vectors) can be into nucleic acid(s) already present in such system (e.g., into the genome of a host cell), so that they are replicated along with such present nucleic acid(s). In some embodiments, a vector may be capable of directing expression of genes they carry; such vectors are referred to herein as “expression vectors.”

[0089] Volatile Organic Compound: Those of ordinary skill in the art will appreciate that the term “Volatile Organic Compound” (“VOC”) is typically used to refer to compounds that have relatively high vapor pressure and low water solubility. In some embodiments, a VOC may be a carbon-containing compound, excluding carbon monoxide, carbon dioxide, carbonic acid, metallic carbides or carbonates, and ammonium carbonate, which participates in atmospheric photochemical reactions. In some embodiments, a VOC may be or comprise a human made chemical, for example such as may have been used and/or produced in the manufacture of an entity such as a paint, a varnish, a wax, a pharmaceutical, a refrigerant, a cleaning or disinfecting product, a degreasing product, a fuel, etc. Alternatively or additionally, in some embodiments, a VOC may be or comprise a solvent, e.g., an industrial solvent (e.g., trichloroethylene), a fuel oxygenates (e.g., methyl tert-butyl ether (MTBE)), a by-product produced by chlorination in water treatment (e.g., chloroform), etc. Still further alternatively or additionally, in some embodiments, a VOC may be or comprise a component of a petroleum fuels, a hydraulic fluid, a paint thinner, a dry cleaning agent, etc. VOCs are common ground-water contaminants. In some embodiments, a VOC may be emitted (e.g., as a gas) from a solid or liquid such as, for example, a paint or lacquer, a paint stripper, cleaning supplies, pesticides, building materials or furnishings, office equipment such as copiers and printers, a correction fluid or carbonless copy paper, graphics and/or craft materials including glues and adhesives, permanent markers, photographic solutions, etc. In some embodiments, a VOC has a vapor pressure of about 0.01 kPa or more 20° C., or otherwise having a corresponding volatility under the particular conditions in which it is utilized and/or maintained.

### BRIEF DESCRIPTION OF THE DRAWING

[0090] FIG. 1 is a schematic of a typical leaf cross-section, shown are tissues of particular interest such as the cuticle, stoma, and intracellular space.

[0091] FIG. 2 is a schematic representation of certain enzymes, cofactors, and substrates related to formaldehyde capture and metabolism utilized herein.

[0092] FIG. 3 is a schematic representation of certain enzymes, cofactors, and substrates related to benzene, toluene, ethylbenzene, and xylene (BTEX) capture and metabolism utilized herein.

[0093] FIG. 4 is a map and reading frame expression analysis of an exemplary construct comprising formaldehyde metabolism enzymes.

[0094] FIG. 5 is a map of an exemplary plasmid construct containing a combination of transcriptional units comprising pollution metabolizing enzymes as described herein. This exemplary construct comprises: 1) two formaldehyde degrading enzymes FALDHEa and FDH3 linked with an IntF2A self-excising domain and a metabolically downstream HPS-Bm/PHI-Bm fusion protein; 2) an exemplary BTEX metabolizing enzyme, TodC1; 3) an exemplary stomatal density modulating protein, AtStomagen; 4) two optional enzymes that increase astaxanthin levels in leaves; and 5) an hpt gene encoding a hygromycin resistance marker. Gene of interest sequences are operably linked to various promoters, and followed by terminator sequences. Proteins can optionally be fused with a cellular localization signal.

[0095] FIG. 6 shows exemplary multiplex PCR genotyping results for ten successfully transformed Epipremnum aureum lines. Shown are transcriptional units coding for an exemplary formaldehyde degrading pathway: DASCanbo (Top band) and DAKY (Bottom band). Genotyping was performed using gene specific primers. The two last wells correspond to samples from wildtype (WT) non-transformed Epipremnum aureum acting as negative controls.

[0096] FIG. 7 shows exemplary qPCR results showing mRNA transcript levels of eight successfully transformed Epipremnum aureum lines that correctly express the FALDHEa gene. The two last entries correspond to samples of non-transformed plants as a negative control.

[0097] FIG. 8 is a representative fluorescence confocal microscopy image of a transformed Epipremnum aureum callus (pre-differentiation) expressing a formaldehyde metabolizing protein fused with a GFP tag.

[0098] FIG. 9 is a representative fluorescence confocal microscopy image of a developed Epipremnum aureum leaf expressing a formaldehyde metabolizing protein fused with a GFP tag.

[0099] FIG. 10 presents a graphical representation of bacterial growth (Mc8) when grown on increasing concentrations of formaldehyde. The X axis represents time, while the Y axis represents bacterial growth as measured by optical density at 600 nm.

[0100] FIG. 11A-B present a graphical representation of exemplary experiments measuring formaldehyde concentrations in growth media for WT MoCBMB20 bacteria (grey) when compared to an evolved strain FR4S (turquoise). FIG. 11A shows the removal of Formaldehyde (Y axis, measured in mM) from culture media over time (X axis, measured in hours). FIG. 11B shows the percentage of formaldehyde left in medium (Y axis) following culturing for a period of time with starting concentrations of formaldehyde ranging from 1 mM to 22 mM (X axis).

[0101] FIG. 12 presents a graphical representation of exemplary experiments measuring formaldehyde concentrations in growth media for WT MoCBMB20 bacteria (grey) when compared to an evolved strain (turquoise solid line), or a strain that has been selected for (turquoise dotted line). The Y axis represents formaldehyde concentrations in mM, while the X axis represents time in hours.

[0102] FIG. 13A-B presents a graphical representation of exemplary experiments measuring removal of atmospheric toluene by plant microbiome combinations. Wild type microbiomes are presented in grey, while evolved microbiomes are presented in turquoise. Atmospheric toluene levels are depicted on the Y axis (measured in PPM), while time is presented on the X axis (measured in hours), experiments were performed in a sealed 2 L chamber. FIG. 13A present a graphical representation of removal of atmospheric toluene by plant microbiome combinations during a 12 hour period. FIG. 13B present a graphical representation of removal of atmospheric toluene by plant microbiome combinations during a 60 hour period.

[0103] FIG. 14A-B presents a graphical representation of exemplary experiments measuring removal of atmospheric benzene by plant microbiome combinations. Wild type microbiomes are presented in grey, while evolved microbiomes are presented in turquoise. Atmospheric benzene levels are depicted on the Y axis (measured in PPM), while time is presented on the X axis (measured in hours), experiments were performed in a sealed 2 L chamber. FIG. 14A present a graphical representation of removal of atmospheric benzene by plant microbiome combinations during a 12 hour period. FIG. 14B present a graphical representation of removal of atmospheric benzene by plant microbiome combinations during a 60 hour period.

[0104] FIG. 15 presents a graphical representation of exemplary experiments measuring removal of atmospheric Xylene by plant microbiome combinations. Wild type microbiomes are presented in grey, while evolved microbiomes are presented in turquoise. Atmospheric Xylene levels are depicted on the Y axis (measured in PPM), while time is presented on the X axis (measured in hours), experiments were performed in a sealed 2 L chamber.

[0105] FIG. 16 shows formaldehyde bioremediation via Epipremnum aureum inoculation with Methylobacterium extorquens PA1 (MePA1) and Methylobacterium oryzae CBMB20 (MoCBM) and Pseudomonas putida F1 (PpF1).

[0106] FIG. 17A-D show toluene phytoremediation via Epipremnum aureum inoculation with the fungus Cladophialophora psammophila (Cp) or Cladophialophora immunda (Ci). FIG. 17A shows the phytoremediation capacity of the resulting plants measured at 24 h. FIG. 17B shows the phytoremediation capacity of the resulting plants measured at 1 week. FIG. 17C shows the phytoremediation capacity of the resulting plants measured at 2 weeks. FIG. 17D shows the phytoremediation capacity of the resulting plants measured at 4 weeks.

[0107] FIG. 18A-18B show formaldehyde phytoremediation capacity in transgenic plants via the xylulose monophosphate (XuMP) pathway. FIG. 18A shows the gaseous concentration of formaldehyde measured before and after exposure to high levels of formaldehyde for 24 hours exposure, the results are normalized by leaf surface area and the WT value is set at 100. FIG. 18B shows metabolomics results of trangenic plants exposed to 0 or 5 mM formaldehyde over 18 hours.

[0108] FIG. 19A-B show formaldehyde phytoremediation capacity in transgenic plants via the Serine pathway. FIG. 19A shows the gaseous concentration of formaldehyde measured before and after exposure to high levels of formaldehyde for 24 hours exposure, the results are normalized by leaf surface area and the WT value is set at 100. FIG. 19B shows metabolomics results of trangenic plants exposed to 0 or 10 mM formaldehyde over 18 hours.

[0109] FIG. 20 shows Benzene, Toluene, Ethylbenzene or Xylene (BTEX) phytoremediation capacity in transgenic plants after exposure to high levels of BTEX for 24 hours.

[0110] FIG. 21A-C show stomatal density and phytoremediation experimental in a model plant, Arabidopsis thaliana. FIG. 21A shows microscopy image of Arabidopsis thaliana leaf surface of a WT or transgenic plant overexpressing the gene, At_Caprice. FIG. 21B is a plot of the various independent Arabidopsis thaliana transgenic lines overexpressing At_Caprice stomatal density and amount of formaldehyde remediated by the plant. FIG. 21C shows formaldehyde phytoremediation capacity of WT Arabidopsis thaliana or At_Caprice, Os_Stomagen and At_Stomagen transgenic lines.

[0111] FIG. 22A-B shows the capacity of regulatory elements to increase expression levels of a polypeptide. FIG. 22A shows single cell fluorescence levels, reflecting promoter/terminator strengths in Epipremnum aureum leaf mesophyll cells. FIG. 22B shows a list of a subset of promoters and terminator identified in FIG. 22A.

### DETAILED DESCRIPTION OF CERTAIN EMBODIMENTS

### Indoor Air Quality

[0112] Indoor air contamination is a complex problem involving particles (such as dust and smoke), biological agents (e.g., microbial agents such as molds, spores, viruses), radon, asbestos, and gaseous contaminants such as CO, CO₂, NOₓ, SOₓ, aldehydes and VOCs (Volatile Organic Compounds). Among these, at least VOCs are strongly suspected to cause many Indoor Air Quality (IAQ) associated health problems and “sick-building” symptoms (see e.g., Wallace, 2001; Jones, 1999; Wieslander et al., 1997; Yu and Crump, 1998). In some embodiments, the present disclosure is directed to technologies designed to ameliorate the effects of indoor air contamination.

[0113] It is estimated that Americans spend nearly 90% of their time indoors, and that nearly 25% of US residents are affected by poor IAQ either at the workplace or at home. The US Environmental Protection Agency (EPA) ranks poor IAQ among its largest national environmental threats. Its counterpart, the European Environmental Agency (EEA) has described IAQ as one of the priority concerns for children's health, similar issues are faced worldwide (see e.g., Zhang and Smith, 2003; Observatory on Indoor Air Quality, 2006, Zumairi et al., 2006). In some cases, buildings can contain such high levels of contaminants that they are qualified as “sick” because exposure to them results in multiple sickness symptoms (e.g. headache, fatigue, skin and eye irritations, and/or respiratory illness). This condition is commonly described as “sick-building syndrome” (SBS) (see e.g., Burge, 2004).

[0114] It has been suggested that indoor air pollution causes between 65,000 and 150,000 deaths per year in the US, which is comparable to outdoors pollution induced mortality (see e.g., Lomborj, 2002). IAQ is also thought to impact work productivity, for example, Wargocki et al. (1999) showed subjects exposed to a typical indoor pollution source (e.g., plastic carpet) typed 6.5% less than control subjects. Likewise, certain other empirical studies have shown that the use of ventilation rates lower than 25 L s-1 per person in commercial and institutional buildings was correlated to an increase in the number of short-term sick leaves taken by employees (see e.g., Sundell, 2004). Using these data, at the turn of the century it was estimated that in the USA alone, $40-200 billion (USD) could be saved or gained in increased productivity annually by simply improving IAQ (in 1996 USD; Fisk, 2000). This estimate is thought to have increased as time has passed. In fact, by the early 2000s, this problem was already driving an important IAQ market that reached $5.6 billion in 2003 in the USA (Market report: indoor air quality, 2004).

[0115] Interestingly, there is no clear or unanimous public definition of what a VOC is. For example, the US EPA defines VOCs as substances with vapor pressure greater than 0.1 mmHg, while the Australian National Pollutant Inventory defines them as any chemical based on carbon chains or rings with a vapor pressure greater than 2 mm Hg at 25° C., and the EU defines them as chemicals with a vapor pressure greater than 0.074 mm Hg at 20° C. In addition, in some cases, chemicals such as CO, CO2, CH4, and sometimes aldehydes, are often excluded. Finally, additional sub-classifications such as Very Volatile Organic Compounds (VVOCs) or Semi Volatile Organic Compounds (SVOCs) have been used in the context of IAQ measurements (see e.g., Crump, 2001; Ayoko, 2004).

[0116] Several organizations such as the World Health Organization (WHO), the US EPA, or the OQAI (French Indoor Air Quality Observatory), have established lists of priority indoor air pollutants (see e.g., WHO, 2000; Johnston et al., 2002; Mosqueron and Nedellec, 2002, OQAI) based on the ubiquity, concentration, and potential toxic effect of the substances involved. These lists are relatively similar and systematically include aldehydes, aromatics, halogenates, and certain biocides. It is thought that certain differences in the classifications are likely due to the type of pollution taken into account, (only chemicals for the EPA, no mixtures such as tobacco smoke for the OQAI) and the geographic specificities of indoor air pollution. For example, geographically and/or culturally related variations in building materials, consumables such as cleaning products, and/or types of ventilation utilized can generate differences in measured indoor air pollutants and pollution levels (see e.g., Sakai et al., 2004). It is thought that various governing bodies IAQ priority lists will most likely evolve upon new analytical and toxicological findings. For example, as studies, data, and analytical methods improve, certain pollutants more relevant to important IAQ factors can be highlighted, e.g., the health effects of chronic exposure to multiple pollutants at low concentration (see e.g., Mosqueron and Nedellec, 2002). It is hypothesized that lack of relevant data and/or analysis explains why there are so few consistent guidelines for VOC indoor air concentrations currently available (see e.g., WHO, 2000; Canada, 1987).

[0117] In certain situations, hundreds of VOCs can be found simultaneously in indoor air, and that these compounds can exhibit very large variations in concentration as well as physical, chemical, and biological properties. Furthermore, while not being bound by current theory, it is thought that the composition of pollutants in a given enclosure can vary in time, e.g., the concentration of VOCs released from coating and furniture generally decreases in time, whereas the release of other certain substances depends on human activities or even respiration (see e.g., Ekberg, 1994; Phillips, 1997; Miekisch et al., 2004). While not being bound by current theory, it is thought that primary emissions of VOCs constitute a major source in new or renovated dwellings, particularly during the first few months following construction, whereas physical and chemical deterioration of buildings material (named secondary emission) later becomes a main mechanisms of VOC release (see e.g., Wolkoff and Nielsen, 2001; Yu and Crump, 1998). While not being bound by current theory, it is thought that indoor VOC concentrations can depend on the total space volume, pollutant production rate, pollutant removal rates, indoor-outdoor air exchange rates, and outdoor VOC concentrations (see e.g., Salthammer, 1997).

[0118] It is estimated that typical air exchange rates in rooms without mechanical ventilation systems can range from 0.1 h⁻¹ to 0.4 h⁻¹. In general, indoor VOC concentrations are higher than outdoor concentrations as VOCs are often released from human activities and a wide variety of materials such as floorings, linoleum, carpets, paints, surface coatings, furniture etc. (see e.g., Yu and Crump, 1998). For instance, Salthammer (1997) demonstrated that certain furniture coatings could release 150 different VOCs (mainly aliphatic and aromatic aldehydes, aromatic hydrocarbons, ketones, esters and glycols) at Total VOC (TVOC) concentrations up to 1288 μg m-3 in test chamber studies, and TVOC emission rates as high as 22,280 μg m-2 h-1 have been recorded from vinyl/pvc flooring (Yu and Crump, 1998). Additionally, certain molds and bacteria can contribute significantly to the presence of particles (spores) and VOCs in indoor pollution (see e.g., Schleibinger et al., 2004). It is thought that microbial development in buildings may provoke toxic and allergic responses, and can generally be found in places where humidity accumulates (e.g., areas with defective heating and air conditioning systems, garbage disposals, bathrooms, areas with water leaks, etc.). Thus, although in some situations, the individual concentrations of each contaminant may generally be considered as low (μg m-3), it is feasible for several hundred contaminants to be found simultaneously, resulting in significant TVOC levels. Indeed, Kostiainen (1995) demonstrated that individual concentrations of selected pollutants were 5-1000 times higher in 38 Finish sick-houses (defined as houses in which people experienced symptoms associated with SBS) than their mean concentrations in 50 normal houses used as reference, with over 200 VOCs being simultaneously detected in 26 of the houses investigated. This same study also reported a maximal TVOC concentration of 9538 μg m-3 in one sick house compared to the mean concentration of 121 μg m-3 recorded in normal houses. In line with these results, Brown and Crump (1996) recorded TVOC concentrations up to 11,401 μg m-3 in UK homes and Daisey et al. (1994) reported indoor TVOC concentrations of 230-700 μg m-3 (geometric mean of 510 μg m-3) in 12 Californian office buildings. While it is not simple to correlate TVOC concentration with health effects, (as this generic parameter does not reflect the individual differences in toxicities found among indoor air VOCs), it has been empirically reported that experiences of eye, nose, or mouth irritation is increased at 5000-25,000 μg TVOC m-3 (Andersson et al., 1997).

[0119] Although indoor VOCs such as benzene or some polycyclic aromatic hydrocarbons are recognized as human carcinogens, a direct association between exposure to VOCs and SBS symptoms or cancer has not been fully established at typical indoor air concentrations (Wallace, 2001). However, several studies have correlated exposure to low concentrations of these pollutants with increased risks of cancer, or eye and airways irritations (Vaughan et al., 1986, Wallace, 1991, Wolkoff and Nielsen, 2001). Certain symptoms such as headache, drowsiness, fatigue and confusion have been recorded in subjects exposed to 22 VOCs at 25 μg m-3 (Hudnell et al., 1992), while, exposure to 1000 μg m-3 of formaldehyde can cause coughing and eye irritation. In addition, many VOCs thought “harmless” may react with oxidants such as ozone, producing highly reactive compounds that can be more harmful than their precursors, some of which are sensory irritants (Sundell, 2004; Wolkoff et al., 1997; Wolkoff and Nielsen, 2001). Finally, it is hypothesized that reported concentrations of VOCs based on stationary measurement may lead to a systemic underestimation of real VOC exposure. For example, the real exposure of subjects evaluated in epidemiological studies may be 2-4 times higher than levels reported, as concentrations in breathing zones could be significantly higher than those recorded with traditional methods (Rodes et al., 1991; Wallace, 1991; Wolkoff and Nielsen, 2001). In certain embodiments, technologies described herein (e.g., compositions and methodologies) are designed to remove certain VOCs from the environment, increasing the quality of indoor air. In some embodiments, technologies described herein reduce symptoms associated with syndromes such as SBS. In certain embodiments, technologies described herein increase certain quality of life metrics.

[0120] In certain embodiments, technologies described herein are directed to the removal and/or remediation of certain volatile chemicals, such as formaldehyde, methanol, benzene, toluene, ethylbenzene, and/or xylene. In certain embodiments, technologies described herein are directed to the removal and/or remediation of formaldehyde. In certain embodiments, technologies described herein are directed to the removal and/or remediation of methanol. In certain embodiments, technologies described herein are directed to the removal and/or remediation of benzene. In certain embodiments, technologies described herein are directed to the removal and/or remediation of toluene. In certain embodiments, technologies described herein are directed to the removal and/or remediation of ethylbenzene. In certain embodiments, technologies described herein are directed to the removal and/or remediation of xylene.

### Formaldehyde

[0121] In some embodiments, technologies described herein are particularly amenable for the removal of aromatic formaldehyde. In some embodiments, formaldehyde metabolizing enzymes (e.g., as described herein) are introduced to a composition (e.g., as described herein, e.g., a plant and/or a microorganism) and facilitate the removal and/or remediation of formaldehyde. In certain embodiments, formaldehyde (HCHO) destined for removal and/or remediation by technologies described herein can be from numerous sources. For example, in certain embodiments, targeted HCHO is industrially produced from natural gas, and/or is produced from household products such as but not limited to adhesives, bonding agents, and/or solvents.

[0122] While not being bound by current theory, HCHO is thought to react as an electrophile with the side-chains of arginine and lysine and the amino groups of RNA and DNA, which in some cases causes protein-protein, protein-DNA, and/or DNA-DNA cross-links. In part based on these molecular characteristics, HCHO is suspected to be carcinogenic and a potentially causative agent in cases of sick-house syndrome. In addition, HCHO is also known as one of the major VOCs of air pollution and the WHO has established an air quality guideline of 0.1 mg m-3. The potential utilization of houseplants for the removal of VOCs was first proposed by Wolverton et al., 1984, while the authors found certain house plants appeared to have a relatively high capacity to remove HCHO from the air, later studies suggest that the primary organisms involved in HCHO removal from the air may not be the plants themselves, but rather microorganisms living symbiotically with the plants, e.g., members of the phyllosphere, rhizosphere, and/or endosphere.

### Methanol

[0123] In some embodiments, technologies described herein are particularly amenable for the removal of aromatic methanol. In certain embodiments, components of metabolic pathways suitable for the phytoremediation of formaldehyde may also be utilized for the phytoremediation of methanol. In some embodiments, methanol dehydrogenase (mdh) is introduced and facilitates the metabolism of methanol into formaldehyde. In some embodiments, technologies described herein suitable for phytoremediation of formaldehyde may also increase methanol metabolism. In some embodiments, such methanol metabolism may be the result of increased downstream flux e.g., increased metabolism of formaldehyde may result in increased metabolism of methanol.

### Benzene, Toluene, Ethylbenzene, and Xylene (BTEX)

[0124] In some embodiments, technologies (e.g., methods and/or compositions) provided herein are particularly amenable for the removal of benzene, toluene, ethylbenzene, and/or xylene (BTEX) from air.

[0125] In some embodiments, technologies provided herein are particularly amenable for the removal of aromatic benzene. In some embodiments, benzene metabolizing enzymes (e.g., as described herein) are introduced to a composition (e.g., as described herein, e.g., a plant and/or a microorganism) and facilitate the removal and/or remediation of benzene. Benzene is a chemical that is a colorless or light yellow liquid at room temperature, and it can be described as having a sweet odor. Benzene is highly flammable, and has the chemical formula C₆H₆, with a molecular mass of 78.11 g/mol. Benzene evaporates into the air very quickly, and its vapor is heavier than air, meaning it may sink into and accumulate in low-lying areas. Benzene dissolves only slightly in water and often will float on top of water. In some embodiments, benzene destined for removal and/or remediation by technologies described herein can be formed from natural processes and/or human activities. In certain embodiments, natural sources of benzene include volcanoes and fires. In certain embodiments, benzene is a product of crude oil, gasoline, and/or cigarette smoke. In some embodiments, benzene is produced industrially, e.g., benzene is widely used in the United States and ranks in the top 20 chemicals for production volume. In some embodiments, benzene is produced to make plastics, resins, nylon, and/or synthetic fibers. In some embodiments, benzene is also used to make some types of lubricants, rubbers, dyes, detergents, drugs, and/or pesticides. In certain embodiments, indoor air may contain higher levels of benzene than outdoor air. Without being bound by theory, it is thought that benzene in indoor air can come from products that contain benzene such as glues, paints, furniture wax, and detergents. Additionally, without being bound by theory, air around hazardous waste sites or gas stations can contain higher levels of benzene than in other areas. Finally, in certain embodiments, a source of indoor air benzene is smoke (e.g., tobacco smoke, coal smoke, wood smoke, incense, etc.). In some embodiments, benzene destined for removal and/or remediation by technologies described herein may be produced from, but is not limited to the sources described herein.

[0126] In some embodiments, technologies provided herein are particularly amenable for the removal of aromatic ethylbenzene. In some embodiments, ethylbenzene metabolizing enzymes (e.g., as described herein) are introduced to a composition (e.g., as described herein, e.g., a plant and/or a microorganism) and facilitate the removal and/or remediation of ethylbenzene. Ethylbenzene is used in the production of styrene, solvents, as a constituent of asphalt and naphtha, and in fuels. Ethylbenzene is a colorless liquid that can be described as smelling like gasoline. The chemical formula for ethylbenzene is C₈H₁₀, and the molecular weight is 106.16 g/mol. While not being bound by current theory, the EPA has classified ethylbenzene as a Group D chemical, (not classifiable as to human carcinogenicity) however, certain experiments have suggested that exposure to ethylbenzene in animal models by inhalation can result in a statistically significant increased incidence of kidney and testicular tumors in male rats, and a suggestive increase in kidney tumors in female rats, lung tumors in male mice, and liver tumors in female mice.

[0127] While not being bound by current theory, it is thought that acute high levels of aromatic benzene and/or ethylbenzene exposure may lead to the following signs and/or symptoms within minutes to several hours following exposure: drowsiness, dizziness, rapid or irregular heartbeat, headaches, tremors, confusion, unconsciousness, and/or death (at very high levels). While not being bound by current theory, it is thought that eating foods and/or drinking beverages containing high levels of benzene and/or ethylbenzene can cause the following symptoms within minutes to several hours following exposure: vomiting, irritation of the stomach, dizziness, sleepiness, convulsions, rapid or irregular heartbeat, and/or death (at very high levels). In some cases, if a person vomits because of swallowing foods or beverages containing benzene, the vomit could potentially be sucked into the lungs, resulting in breathing problems and/or coughing. While not being bound by current theory, it is thought that direct exposure of the eyes, skin, and/or lungs to benzene can cause tissue injury and/or irritation.

[0128] While not being bound by current theory, it is thought that blood is one of the tissues most effected from long term (e.g., exposure of a year or more) benzene and/or ethylbenzene exposure, for example, exposure can cause harmful effects to bone marrow and can cause a decrease in red blood cells, potentially leading to anemia. While not being bound by current theory, it is thought that benzene and/or ethylbenzene can also cause excessive bleeding and can affect the immune system, increasing the chance for infection. It has been reported that some women who breathed high levels of benzene for many months had irregular menstrual periods and a decrease in the size of their ovaries. It is not currently known whether benzene exposure affects the developing fetus in pregnant women or fertility in men. However, while not being bound by current theory, certain animal studies have shown low birth weights, delayed bone formation, and bone marrow damage when pregnant animals inhaled benzene. The United States Department of Health and Human Services (DHHS) has determined that benzene causes cancer in humans, particularly leukemia. In certain embodiments, technologies described herein may be utilized to decrease the incidence of certain diseases related to exposure to certain air pollutants (e.g., VOCs, e.g., formaldehyde, methanol, benzene, toluene, ethylbenzene, and/or xylene).

[0129] In some embodiments, technologies provided herein are particularly amenable for the removal of aromatic toluene. In some embodiments, toluene metabolizing enzymes (e.g., as described herein) are introduced to a composition (e.g., as described herein, e.g., a plant and/or a microorganism) and facilitate the removal and/or remediation of toluene. Toluene is a chemical that in liquid form is colorless, and is thought to have a sweet, pungent, benzene-like odor. Toluene is also known as methyl benzene, methyl benzol, phenyl methane, and/or toluol, and has a chemical formula of C₆H₅CH₃, with a molecular weight of 92.14 g/mol. Toluene occurs naturally in crude oil and in the tolu tree. In certain cases, toluene is produced in the process of making gasoline and other fuels from crude oil and in making coke from coal. In certain cases, toluene is used in making paints, paint thinners, fingernail polish, lacquers, adhesives, and rubber and in some printing and leather tanning processes. In certain cases, toluene is used in the production of benzene, nylon, plastics, and polyurethane and the synthesis of trinitrotoluene (TNT), benzoic acid, benzoyl chloride, and toluene diisocyanate. In certain cases, toluene is also added to gasoline along with benzene and xylene to improve octane ratings.

[0130] While not being bound by current theory, it is thought that acute high levels of toluene exposure may lead to the following signs and/or symptoms within minutes to several hours following exposure: eye and/or nose irritation, lassitude (weakness, exhaustion), confusion, euphoria, dizziness, headache, dilated pupils, lacrimation (discharge of tears), anxiety, muscle fatigue, insomnia, paresthesia, dermatitis, liver damage, and/or kidney damage.

[0131] In some embodiments, technologies provided herein are particularly amenable for the removal of aromatic xylene. In some embodiments, xylene metabolizing enzymes (e.g., as described herein) are introduced to a composition (e.g., as described herein, e.g., a plant and/or a microorganism) and facilitate the removal and/or remediation of xylene. Xylene is a colorless, flammable liquid and is thought to have a sweet odor. While not being bound by current theory, it is thought that there are three forms of xylene in which the methyl groups vary on the benzene ring: meta-xylene, ortho-xylene, and para-xylene (m-, o-, and p-xylene). In certain cases, xylene is also known as xylol or dimethylbenzene. In certain cases, xylene evaporates and burns easily. In certain cases, xylene does not mix well with water; however, it does mix with alcohol and many other chemicals.

[0132] It is thought that xylene is one of the top 30 chemicals produced in the United States in terms of volume. In certain cases, xylene is used as a solvent in the printing, rubber, and leather industries. Along with other solvents, xylene can also be widely used as a cleaning agent, a thinner for paint, and in varnishes. In certain cases, xylene is used as a material in chemical, plastics, and synthetic fiber industries and as an ingredient in the coating of fabrics and papers. In certain cases, isomers of xylene are used in the manufacture of certain polymers such as plastics. In certain cases, xylene is found in airplane fuel and gasoline.

[0133] While not being bound by current theory, it is thought that short-term exposure of people to high levels of xylene can cause irritation of the skin, eyes, nose, and/or throat; difficulty in breathing; impaired function of the lungs; delayed response to visual stimulus; impaired memory; stomach discomfort; and/or possible changes in the liver and/or kidneys. While not being bound by current theory, it is thought that both short- and long-term exposure to high concentrations of xylene can also cause a number of effects on the nervous system, such as headaches, lack of muscle coordination, dizziness, confusion, and/or changes in one's sense of balance. While not being bound by current theory, it is thought that exposure to very high levels of xylene for a short period of time can lead to death.

[0134] While not being bound by current theory, results of certain studies in animals indicate that large amounts of xylene can cause changes in the liver and harmful effects on the kidneys, lungs, heart, and/or nervous system. It is thought that short-term exposure to very high concentrations of xylene in animals causes muscular spasms, incoordination, hearing loss, changes in behavior, changes in organ weights, changes in enzyme activity, and/or potentially death. In certain cases, animals that were exposed to xylene on their skin had irritation and/or inflammation of the skin. In certain cases, it is thought that long-term exposure of animals to low concentrations of xylene can cause harmful effects on the kidney (with oral exposure) and/or on the nervous system (with inhalation exposure). Currently, both the International Agency for Research on Cancer (IARC) and EPA have found that there is insufficient information to determine whether or not xylene is carcinogenic and consider xylene not classifiable as to its human carcinogenicity.

### Indoor Ornamental Plants

[0135] Among other things, the present disclosure recognizes the potential usefulness of indoor ornamental plants in combating poor indoor air quality. In some embodiments, an indoor ornamental plant may also be referred to as a houseplant. In some embodiments, an indoor ornamental plant is engineered to more readily metabolize certain pollutants (e.g., formaldehyde, methanol, BTEX, etc.) when compared to a reference indoor ornamental plant. In some embodiments, engineered ornamental plants provided herein are particularly amenable for the removal of aromatic pollutants. In some embodiments, pollutant metabolizing enzymes (e.g., as described herein) are introduced to an ornamental house plant and facilitate the removal and/or remediation of pollutants from an indoor environment.

Epipremnum aureum, (Aka Pothos, Golden Pothos, or Devil's Ivy)

[0136] In certain embodiments, a composition and/or method described herein comprises an indoor ornamental house plant that is Epipremnum aureum. Epipremnum aureum is a species of flowering plant in the arum family Araceae, native to Mo'orea in the Society Islands of French Polynesia. The species is a popular houseplant in temperate regions, but has also become naturalized in tropical and sub-tropical forests worldwide, including northern Australia, Southeast Asia, South Asia, the Pacific Islands and the West Indies (where it has caused severe ecological damage in some cases). The plant has a multitude of common names including golden pothos, pothos, Ceylon creeper, hunter's robe, ivy arum, silver vine, Solomon Islands ivy, marble queen, devil's vine, devil's ivy, and taro vine.

[0137] In certain embodiments, Epipremnum aureum is particularly amenable as an indoor ornamental house plant as it is considered hardy, is often difficult to kill, and generally stays green even when kept in the dark. In certain embodiments, Epipremnum aureum is an evergreen vine growing to 20 m (66 ft) tall, with stems up to 4 cm (2 in) in diameter, climbing by means of aerial roots which adhere to surfaces. In certain embodiments, Epipremnum aureum leaves are alternate, heart-shaped, entire on juvenile plants, but irregularly pinnatifid on mature plants, up to 100 cm (39 in) long and 45 cm (18 in) broad; juvenile leaves may be smaller, typically under 20 cm (8 in) long. In certain embodiments, Epipremnum aureum rarely flowers without artificial hormone supplements, but when it does, the flowers are produced in a spathe up to 23 cm (9 in) long. In certain embodiments, pothos produces trailing stems when it climbs up trees and/or other structures, and these trailing stems can take root when they reach the ground and grow along it. In certain embodiments, leaves on trailing stems grow up to 10 cm (4 in) long and are reminiscent of the leaves seen on pothos when it is cultivated as a potted plant. In certain embodiments, pothos can be considered a popular houseplant with numerous cultivars selected for leaves with white, yellow, or light green variegation. In certain embodiments, pothos can be used in decorative displays in shopping centers, offices, and/or other public locations in part because it requires little care and is also attractively leafy. In certain tropical countries, pothos may be found in parks and gardens and tends to grow naturally. In certain embodiments, as an indoor plant, pothos can reach more than 2 m in height, particularly when given adequate support (e.g., a structure to climb), but as an indoor plant, pothos generally fails to develop adult-sized leaves. In certain embodiments, pothos can be considered a “shady” plant, and optimal growth conditions may be achieved by providing indirect light. In certain embodiments, pothos can tolerate an intense luminosity, but long periods of direct sunlight may burn leaves. In certain embodiments, pothos thrives in temperature to tropical temperatures between 17 and 30° C. (63 and 86° F.). In some embodiments, pothos only requires watering when the soil feels dry to the touch. In some embodiments, pothos tolerates and may be benefited by supplemental fertilizers and may grow rapidly in hydroponic culture. In some embodiments, pothos is sometimes used in aquariums, e.g., it may be placed on top of the aquarium and allowed to grow roots into the water, this may be beneficial to the plant and the aquarium as pothos may absorb soluble nitrates and use them for growth.

[0138] In some embodiments, pothos may be considered as toxic to cats and dogs due to the presence of insoluble raphides. In some embodiments, care should be taken to ensure that pothos is not consumed by pets. In some embodiments, symptoms of pothos consumption may include oral irritation, vomiting, and/or difficulty in swallowing. In some embodiments, potentially due to calcium oxalate within pothos, it may be considered mildly toxic to humans as well. In some embodiments, possible side effects from consumption of E. aureum are atopic dermatitis (eczema) as well as burning and/or swelling of the region inside of and surrounding the mouth. In some embodiments, excessive contact with pothos may also lead to general skin irritation

### Alternative Ornamental Plants

[0139] One skilled in the art will recognize that many Ornamental Plants (e.g., indoor ornamental plants) are amenable to the methods described herein, and may provide substrates for the creation of useful compositions.

[0140] In certain embodiments, technologies described herein comprise an engineered indoor ornamental house plant that is of the family Araceae. In certain embodiments, an engineered indoor ornamental house plant can be a member of a genus such as but not limited to the genera Aglaonema, Alocasia, Amorphophallus, Anthurium, Caladium, Colocasia, Dieffenbachia, Epipremnum, Monstera, Philodendron, Rhaphidophora, Scindapsus, Spathiphyllum, Syngonium, Xanthosoma, Zamioculcas, and Zantedeschia. In some particular embodiments, an engineered indoor ornamental house plant may be a member of a species such as but not limited to Alocasia amazonica, Alocasia odora, Alocasia wentii, Alocasia zebrine, Dieffenbachia seguine, Philodendron cordatum, Monstera adansonii, Monstera deliciosa, Philodendron florida, Philodendron hederaceum, Philodendron Xanadu, Monstera obliqua, Syngonium podophyllum, and Zamioculcas zamiifolia.

[0141] In certain embodiments, technologies described herein comprise an engineered indoor ornamental house plant that is of the class Polypodiopsida (e.g., a fern). In some embodiments, an engineered indoor ornamental house plant can be a member of a genus such as but not limited to the genera Adiantum, Aglaomorpha, Asplenium, Blechnum, Cyathea, Davallia, Didymochlaena, Dryopteris, Humata, Microsorum, Nephrolepsis, Pellaea, Phlebodium, Platycerium, Polypodium, and Pteris. In certain embodiments, an engineered indoor ornamental house plant can be a member of a species such as but not limited to the species Adiantum hispidulum, Adiantum raddianum, Adiantum tenerum, Aglaomorpha coronans, Asplenium antiquum, Asplenium nidus, Blechnum gibbum, Cyathea cooperi, Davallia fejeensis, Didymochlaena truncatula, Dryopteris erythrosora, Humata tyermanii, Microsorum diversifolium, Nephrolepis cordifolia, Nephrolepis exaltata, Pellaea rotundifolia, Phlebodium aureum mandaianum, Platycerium bifurcatum, Polypodium formosanum, Pteris cretica, Pteris ensiformis, and Pteris quadriaurita,

[0142] In certain embodiments, technologies described herein comprise an indoor ornamental house plant that is a member of the family Marantaceae (e.g., of the genus Calatheas). In certain embodiments, an engineered indoor ornamental house plant can be a member of a species such as but not limited to the species Calathea ornata, Calathea rufibarba, Calathea orbifolia, Calathea roseopicta, Calathea zebrine, Calathea lancifolia, Calathea warscewiczii, Calathea louisae, Calathea veitchiana, Calathea picturata, Calathea ecuadoriana, Calathea gandersii, Calathea curaraya, Calathea libbyana, Calathea hagbergii, Calathea roseobracteata, Calathea paucifolia, Calathea ischnosiphonoides, Calathea multicinta, Calathea latrinotecta, Calathea dodsonii, Calathea anulque, Calathea lanicaulis, Calathea petersenii, Calathea pluriplicata, Calathea plurispicata, Calathea pallidicosta, Calathea congesta, and Calathea utilis.

[0143] In certain embodiments, technologies describe herein comprise and/or utilize an indoor ornamental plant that is a member of the family Asparagaceae (e.g., of the genus Dracaena or of the genus Beaucarnea. In certain embodiments, an engineered indoor ornamental house plant can be a member of a species such as but not limited to the species Dracaena angolensis, Dracaena marginata, Dracaena trifasciata,

[0144] In certain embodiments, technologies describe herein comprise and/or utilize an indoor ornamental plant that is a member of the family Bambusoideae (e.g., of the genus Phyllostachys). In certain embodiments, an engineered indoor ornamental house plant can be a member of a species such as but not limited to the species Phyllostachys aurea.

[0145] In certain embodiments, technologies describe herein comprise and/or utilize an indoor ornamental plant that is a member of the family Urticaceae (e.g., of the genus Pilea). In certain embodiments, an engineered indoor ornamental house plant can be a member of a species such as but not limited to the species Pilea peperomioides, Pilea cadierei, Pilea grandifolia, Pilea involucrata, Pilea microphylla, Pilea nummulariifolia, Pilea peperomioides

[0146] In certain embodiments, technologies describe herein comprise and/or utilize an indoor ornamental plant that is a member of the family Moraceae (e.g., of the genus Ficus). In certain embodiments, an engineered indoor ornamental house plant can be a member of a species such as but not limited to the species Ficus lyrata, Ficus altissima, Ficus elastica

[0147] In certain embodiments, technologies describe herein comprise and/or utilize an indoor ornamental plant that is a member of the family Araliaceae (e.g., of the genus Heptapleurum). In certain embodiments, an engineered indoor ornamental house plant can be a member of a species such as but not limited to the species Schefflera arboricola.

[0148] In certain embodiments, technologies describe herein comprise and/or utilize an indoor ornamental plant that is a member of the family Acanthaceae (e.g., of the genus Aphelandra). In certain embodiments, an engineered indoor ornamental house plant can be a n: member of a species such as but not limited to the species Aphelandra squamosal, Aphelandra squarrosa.

[0149] In certain embodiments, technologies describe herein comprise and/or utilize an indoor ornamental plant that is a member of the family Arecaceae (e.g., of the genus Howea or of the genus Dypsis). In certain embodiments, an engineered indoor ornamental house plant can be a member of a species such as but not limited to the species Dypsis lutescens, Howea forsteriana, Howea belmoreana.

[0150] In certain embodiments, technologies describe herein comprise and/or utilize an indoor ornamental plant that is a member of the family Strelitziaceae (e.g., of the genus Strelitzia). In certain embodiments, an engineered indoor ornamental house plant can be a member of a species such as but not limited to the species Strelitzia nicolai, Strelitzia reginae.

[0151] In certain embodiments, technologies describe herein comprise and/or utilize an indoor ornamental plant that is a member of the family (e.g., of the genus). In certain embodiments, an engineered indoor ornamental house plant can be a member of a species such as but not limited to the species

Engineering Ornamental Plants and/or Microbes

[0152] In some embodiments, the present disclosure provides technologies that comprise and/or utilize engineered ornamental plants and/or microbes including, for example, chemically engineered, environmentally engineered, and/or genetically engineered plants and/or microbes.

[0153] In some embodiments, chemical engineering may be or comprise exposure to one or more particular chemical agents (e.g., nutrients, mutagens, etc).

[0154] In some embodiments, environmental engineering may be or comprise exposure, maintenance, and/or cultivation under a specified set of conditions (e.g., light, temperature, pressure, pH, etc) and/or involving one or more particular manipulations (e.g., grafting, traditional cloning, re-potting, etc).

[0155] In some embodiments, genetic engineering may be or comprise introducing one or more genetic modifications (e.g., insertions, deletions, and/or alterations of one or more particular sequences—e.g., genes). In some embodiments, genetic modification may involve and/or be accomplished through performance of one or more of transformation, transduction, and/or other introduction of a transgene or other heterologous nucleic acid sequence; disruption and/or interference with expression of one or more genetic sequences (e.g., gene knockout, gene knockdown, etc), induction and/or amplification of expression of one or more genetic sequences, alteration (e.g., by mutagenesis such as targeted or random mutagenesis), etc. In some embodiments, genetic engineering may involve one or more of selective breeding, and/or directed evolution.

[0156] In some embodiments, a plant and/or microbe is genetically engineered through a process of selective breeding and/or directed evolution across multiple generations using at least one sufficiently selective pressure, followed by optional mutation identification (e.g., genotyping), and phenotypic analysis.

[0157] In some embodiments, a plant and/or microbe is genetically engineered through a process of random mutagenesis followed by screening for a trait of interest, optional mutation identification (e.g., genotyping), and phenotypic analysis.

[0158] In some embodiments, a plant and/or microbe is genetically engineered through a process of directed mutagenesis, followed by optional mutation verification (e.g., genotyping), and phenotypic analysis.

[0159] In some embodiments, a plant and/or microbe is genetically engineered through a process of transgene introduction, followed by optional mutation verification (e.g., genotyping), and phenotypic analysis.

[0160] In some embodiments, a plant and/or microbe is genetically engineered by introduction of a vector into such plant and/or microbe (e.g., into a cell or spore thereof). In some embodiments, a vector suitable for plant transformation is generated, is optionally verified through any appropriate technology (e.g., sequencing, PCR, gel electrophoresis), and is then inserted into a plant genome. In some embodiments, insertion into a plant genome can be accomplished through 1) Agrobacterium tumefaciens mediated gene insertion, or 2) biolistic mediated gene insertion (DNA bombardment method).

[0161] In some embodiments, A. tumefaciens insertion may be an appropriate methodology to use when a working protocol exists. In some embodiments, insertion of a gene into a plant comprises: 1) Agrobacterium transformation by electroporation, 2) selection of viable clones, and 3) plant infection; in some embodiments this process can allow for relatively high transformation efficiencies. In some embodiments, binary plasmids are utilized. In some embodiments, binary plasmids are compatible with A. tumefaciens-based transformations. In some embodiments, binary plasmids are utilized as part of a golden gate DNA assembly system.

[0162] In some embodiments, a biolistic particle delivery system, or “gene gun” approach is utilized to mediate gene insertion into a plant. In some embodiments, such an approach utilizes DNA-coated gold particles to deliver a vector of interest to cells, integrating all or at least a portion of the vector (e.g., a coding construct) inside a plants genome (e.g., any endogenous store of genetic material, e.g., DNA of the mitochondria, chloroplast, and/or nucleus). In some embodiments, such an approach creates an artificial chromosome. In some embodiments, an artificial chromosome is stably inherited through multiple generations. In some embodiments, a biolistic particle delivery system is utilized when no efficient A. tumefaciens mediated transformation protocol is available for a particular target species of plant. In some embodiments, a biolistic approach is preferential to A. tumefaciens-based transformations due to an inherent ability of biolistic introduction to target not only nuclear DNA, but also mitochondrial and/or chloroplastic DNA. In certain embodiments, a biolistic approach may be preferential due to an inherent ability to insert lower copy numbers (e.g., 1 copy), potentially reducing the odds of transgene silencing by endogenous defense mechanisms.

### Modifying Endogenous Gene and Transgene Expression

[0163] The present disclosure recognizes that certain endogenous pathways found in plants may contribute to transgene silencing. To overcome said silencing, in certain embodiments, endogenous genes may be silenced (e.g., silenced, knocked out, knocked down, mutated, rendered impotent, etc.) to provide an in-vivo environment more amenable to transgene expression.

[0164] In some embodiments, exogenous transgenes inserted inside a plant are identified and silenced by a plant's endogenous gene regulation machinery. In certain embodiments, such a scenario increases in likelihood as additional transgenes are inserted into one organism. In some embodiments, certain approaches are utilized that facilitate avoidance of transgene silencing, such approaches comprise but are not limited to: 1) utilizing different promoters for each transgene, 2) inserting introns in a gene of interest, 3) utilizing codon optimization to increase transgene translational efficiencies, and/or 4) including multiple functional translational products in one highly heterogeneous vector.

Random and/or Directed Mutagenesis of Plants and/or Microorganisms

[0165] Among other things, in some embodiments, the present disclosure provides compositions and methods suitable for engineering plants and/or microbes (e.g., potential microbiome components) with enhanced desirable characteristics through the use of random and/or directed mutagenesis, followed by selection, and phenotypic analysis.

[0166] In certain embodiments, random mutagenesis is mediated through exposure to radiation (e.g., X-rays, gamma radiation, UV radiation etc.), and/or exposure to a chemical mutagen (e.g., NaN₃, EMS, MNU etc.). Those skilled in the art are aware of the standard techniques used to randomly mutate plants and/or microbes.

[0167] In certain embodiments, following random mutagenesis, plants and/or microbes are screened for enhanced desirable characteristics (e.g., higher tolerance to and/or biodegradation rates of certain pollutants, e.g., VOCs, and/or e.g., an ability to grow on certain pollutants as a sole carbon source). In certain embodiments, plants and/or microbes with desirable characteristics are identified, isolated, and bred with other plants and/or microbes with desirable characteristics. In some embodiments, a multi-generational program is initiated and desirable traits are enhanced through successive generations.

[0168] In certain embodiments, characteristics, enhanced or otherwise, of one plant and/or microbe may be transfer to another through horizontal gene transfer. For example, in certain embodiments, horizontal gene transfer may comprise transfer of a desired trait (e.g., high biodegradation rate of a certain pollutant), from one host organism to another acceptor organism (e.g., from one or more microorganisms into one or more other microorganisms). In certain embodiments, an acceptor organism may also comprise an additional trait of interest, (e.g., one or more desirable traits, e.g., one or more genes contributing to biodegradation of another and/or the same pollutant, and/or another desirable trait such as stable interaction and/or survival in the plant-soil-pot system).

Selective Breeding of Plants and/or Microorganisms

[0169] Among other things, the present disclosure provides compositions and methods suitable for engineering plants and/or microbes (e.g., potential microbiome components) with enhanced desirable characteristics.

[0170] In certain embodiments, wild type and/or naturally occurring plants and/or microbes are screened for desirable characteristics (e.g., higher tolerance to and/or biodegradation rates of certain pollutants, e.g., VOCs). In certain embodiments, plants and/or microbes with desirable characteristics are identified, isolated, and bred with other plants and/or microbes with desirable characteristics. In some embodiments, a multi-generational program is initiated and desirable traits are enhanced through successive generations.

Directed Evolution of Plants and/or Microorganisms

[0171] Among other things, the present disclosure provides compositions and methods suitable for engineering microbes (e.g., potential microbiome components) with enhanced desirable characteristics.

[0172] In certain case studies comprising tested plants, it is thought that potentially up to a third of the phytoremediation of indoor air pollutants is due to microbiome components. In some cases, species of bacteria and/or fungi living on and/or around a plant stem and/or leaves (phyllosphere), roots (rhizosphere), and/or within the plant (endosphere) are numerous and may be plant-specific. It is thought that some microbiome components, such as Methylobacterium and Pseudomonas putida, are naturally capable of absorbing and metabolizing pollutants such as formaldehyde and BTEX respectively. In some embodiments of technologies described herein (e.g., of compositions and/or methods), once a particular microbe is identified and optionally isolated (e.g., through monoculture), such a microbe (e.g., bacteria, fungi, etc.) are subjected to an artificial selective pressure over multiple generations, facilitating directed evolution, and an enhancement of certain desirable characteristics (e.g., improvements to their plant symbiosis and/or their phytoremediation capabilities). In some embodiments of technologies described herein, after directed evolution, a microbe may be utilized alone, or may be inoculated into and/or onto a plant and therefore contribute to overall phytoremediation (e.g., adsorption and/or degradation of VOCs).

### Transgenic Vectors

[0173] In certain embodiments, the present disclosure provides vectors suitable for engineering of plants and/or microbes. In certain embodiments, the present disclosure provides polynucleotide vectors suitable for transgene introduction into plants and/or microbes. In certain embodiments, polynucleotide vectors comprise a coding sequence and may be referred to herein as a construct. In some embodiments, a coding sequence may comprise the genetic information required to create useful products, e.g., RNA and/or proteins that may confer desirable traits (e.g., higher tolerance to and/or biodegradation rates of certain pollutants, e.g., VOCs).

[0174] In some embodiments, a vector described herein can further include regulatory and/or control sequences that alter the transcription and/or translation of an encoded gene, e.g., a control sequence selected from the group of a transcription initiation sequence, a transcription termination sequence, a promoter sequence, an enhancer sequence, an RNA splicing sequence, a polyadenylation (poly(A)) sequence, a Kozak consensus sequence, and/or any combination thereof. In some embodiments, a promoter can be a native promoter, a constitutive promoter, an inducible promoter, and/or a tissue-specific promoter. Non-limiting examples of transcriptional and/or translational control sequences are described herein.

### Exemplary Vector Components

### Cloning Vectors

[0175] In some embodiments, technologies described herein comprise a vector. In some embodiments, a vector is a transgenic vector. In some embodiments, a transgenic vector comprises a cloning vector. In certain embodiments, a transgenic vector comprises an engineered polynucleotide suitable for introduction into an organism.

[0176] In some embodiments, a transgenic vector may comprise a backbone sequence. In some embodiments, a transgenic vector may comprise at least one promoter. In some embodiments, a transgenic vector may comprise at least one 5′ UTR. In some embodiments, a transgenic vector may comprise at least one organelle localization signal. In some embodiments, a transgenic vector may comprise at least one gene of interest (e.g., an enzyme and/or protein of interest). In some embodiments, a transgenic vector may comprise at least one tag sequence (e.g., a fluorescent tag). In some embodiments, a transgenic vector may comprise at least one 3′ UTR. In some embodiments, a transgenic vector may comprise at least one transcription termination sequence. In some embodiments, a transgenic vector may comprise at least one selectable marker.

[0177] In some embodiments, the present disclosure provides compositions and methods suitable for engineering polynucleotide vectors (e.g., plasmids etc.). In certain embodiments, a polynucleotide vector comprises at least one transgene to be inserted into a plant and/or microbes genome (e.g., any store of genetic information, e.g., nuclear DNA, mitochondrial DNA, chloroplastic DNA etc.). One skilled in the art will recognize that in some embodiments, many molecular biology methodologies now exist that may facilitate engineering of vectors suitable for transgenic engineering. For example, in some embodiments, a method suitable for transgenic engineering may comprise the use of golden gate DNA assembly systems. In some embodiments, golden gate DNA assembly systems may be particularly amenable for creation of compositions described herein. In some embodiments, a transgenic engineering system comprises a three step hierarchical modular cloning scheme. In some embodiments, a golden gate DNA assembly system facilitates high efficiency assembly of complex multigene vectors that can encode entire pathways. In some embodiments, multigene vectors may begin as libraries of basic modules containing regulatory and/or coding sequences. In certain embodiments, a cloning process utilizes type IIS restriction enzymes. In some embodiments, transgenic engineering (e.g., for metabolic engineering) can be rendered highly efficient through use of golden gate DNA assembly systems as the inherent modularity facilitates iterative design, and building of multiple variants of a particular genetic circuit. In some embodiments, expression ratios of several genes can be obtained, and optimal parameters for a synthetic pathway can be engineered and tested in parallel. In certain embodiments, use of restriction enzymes during golden gate DNA assembly allows for high throughput engineering. In certain embodiments, use of restriction enzymes during golden gate DNA assembly allows for error-free engineering. In certain embodiments, use of restriction enzymes during golden gate DNA assembly allows for both high throughput and error-free engineering, which can be considered highly advantageous over traditional PCR-based cloning techniques. One skilled in the art will recognize that multiple DNA assembly and/or cloning technologies exist and may be suitable for the creation of vectors, and/or compositions described herein.

[0178] In certain embodiments, metabolic pathways described herein (e.g., pathways suitable for transgenic engineering, e.g., metabolic engineering) are tested in parallel, e.g., by simultaneously launching transformation of dozens of plant lines each with at least one DNA vector. In certain embodiments, metabolic pathways described herein (e.g., pathways suitable for transgenic engineering, e.g., metabolic engineering) are tested in parallel, e.g., by simultaneously launching the transformation of dozens of plant lines each with at least one different DNA vector. In some embodiments, compositions and methods describe herein are tested using a protoplasts system (e.g., a cell suspension). In some embodiments, use of golden gate DNA assembly and/or protoplast systems permits in vivo testing prior to plant transformation.

[0179] In some embodiments, a vector for metabolic engineering as described herein can be or comprise but is not limited to, a plasmid, a transposon, a cosmid, an artificial chromosome (e.g., a human artificial chromosome (HAC), a yeast artificial chromosome (YAC), a bacterial artificial chromosome (BAC), a P1-derived artificial chromosome (PAC)), a viral vector, a Gateway® plasmid, etc. In some embodiments, suitable vectors provided herein can be of different sizes.

[0180] In some embodiments, a vector is a plasmid and can include a total length of up to about 1 kb, up to about 2 kb, up to about 3 kb, up to about 4 kb, up to about 5 kb, up to about 6 kb, up to about 7 kb, up to about 8 kb, up to about 9 kb, up to about 10 kb, up to about 11 kb, up to about 12 kb, up to about 13 kb, up to about 14 kb, up to about 15 kb, up to about 16 kb, up to about 17 kb, up to about 18 kb, up to about 19 kb, up to about 20 kb, up to about 21 kb, up to about 22 kb, up to about 23 kb, up to about 24 kb, up to about 25 kb, up to about 26 kb, up to about 27 kb, up to about 28 kb, up to about 29 kb, up to about 30 kb, up to about 31 kb, up to about 32 kb, up to about 33 kb, up to about 34 kb, or up to about 35 kb. In some embodiments, a vector is a plasmid and can have a total length in a range of about 1 kb to about 2 kb, about 1 kb to about 3 kb, about 1 kb to about 4 kb, about 1 kb to about 5 kb, about 1 kb to about 6 kb, about 1 kb to about 7 kb, about 1 kb to about 8 kb, about 1 kb to about 9 kb, about 1 kb to about 10 kb, about 1 kb to about 11 kb, about 1 kb to about 12 kb, about 1 kb to about 13 kb, about 1 kb to about 14 kb, about 1 kb to about 15 kb, 1 kb to about 16 kb, about 1 kb to about 17 kb, about 1 kb to about 18 kb, about 1 kb to about 19 kb, about 1 kb to about 20 kb, about 1 kb to about 21 kb, about 1 kb to about 22 kb, about 1 kb to about 23 kb, about 1 kb to about 24 kb, about 1 kb to about 25 kb, about 1 kb to about 26 kb, about 1 kb to about 27 kb, about 1 kb to about 28 kb, about 1 kb to about 29 kb, about 1 kb to about 30 kb, about 2 kb to about 12 kb, about 2 kb to about 14 kb, about 2 kb to about 16 kb, about 2 kb to about 18 kb, about 2 kb to about 20 kb, about 2 kb to about 22 kb, about 2 kb to about 24 kb, about 2 kb to about 26 kb, about 2 kb to about 28 kb, about 2 kb to about 30 kb, about 5 kb to about 10 kb, about 5 kb to about 12 kb, about 5 kb to about 14 kb, about 5 kb to about 16 kb, about 5 kb to about 18 kb, about 5 kb to about 20 kb, about 5 kb to about 22 kb, about 5 kb to about 24 kb, about 5 kb to about 26 kb, about 5 kb to about 28 kb, about 5 kb to about 30 kb, about 5 kb to about 32 kb, about 5 kb to about 34 kb, about 5 kb to about 36 kb, about 10 kb to about 12 kb, about 10 kb to about 14 kb, about 10 kb to about 16 kb, about 10 kb to about 18 kb, about 10 kb to about 20 kb, about 10 kb to about 22 kb, about 10 kb to about 24 kb, about 10 kb to about 26 kb, about 10 kb to about 28 kb, about 10 kb to about 30 kb, about 14 kb to about 16 kb, about 14 kb to about 18 kb, about 14 kb to about 20 kb, about 14 kb to about 22 kb, about 14 kb to about 24 kb, about 14 kb to about 26 kb, about 14 kb to about 28 kb, about 14 kb to about 30 kb, about 18 kb to about 20 kb, about 18 kb to about 22 kb, about 18 kb to about 24 kb, about 18 kb to about 26 kb, about 18 kb to about 28 kb, about 14 kb to about 30 kb, about 14 kb to about 32 kb, about 16 kb to about 34 kb, about 18 kb to about 36 kb, about 20 kb to about 22 kb, about 20 kb to about 24 kb, about 20 kb to about 26 kb, about 20 kb to about 28 kb, about 20 kb to about 30 kb, about 20 kb to about 32 kb, about 20 kb to about 34 kb, about 20 kb to about 36 kb, about 26 kb to about 30 kb, about 28 kb to about 30 kb, about 24 to about 26 kb, or about 25 to about 27 kb.

[0181] In some embodiments, a vector is an artificial chromosome and can include a total length of up to about 3000 kb, up to about 2900 kb, up to about 2800 kb, up to about 2700 kb, up to about 2600 kb, up to about 2500 kb, up to about 2400 kb, up to about 2300 kb, up to about 2200 kb, up to about 2100 kb, up to about 2000 kb, up to about 1900 kb, up to about 1800 kb, up to about 1700 kb, up to about 1600 kb, up to about 1500 kb, up to about 1400 kb, up to about 1300 kb, up to about 1200 kb, up to about 1100 kb, up to about 1000 kb, up to about 900 kb, up to about 800 kb, up to about 700 kb, up to about 600 kb, up to about 500 kb, up to about 400 kb, up to about 375 kb, up to about 350 kb, up to about 325 kb, up to about 300 kb, up to about 275 kb, up to about 250 kb, up to about 225 kb, up to about 200 kb, up to about 175 kb, up to about 150 kb, or up to about 125 kb.

[0182] In some embodiments, a vector is a viral vector and can have a total number of nucleotides of up to 10 kb. In some embodiments, a viral vector can have a total number of nucleotides in the range of about 1 kb to about 2 kb, 1 kb to about 3 kb, about 1 kb to about 4 kb, about 1 kb to about 5 kb, about 1 kb to about 6 kb, about 1 kb to about 7 kb, about 1 kb to about 8 kb, about 1 kb to about 9 kb, about 1 kb to about 10 kb, about 1 kb to about 11 kb, about 1 kb to about 12 kb, about 1 kb to about 13 kb, about 1 kb to about 14 kb, about 1 kb to about 15 kb, about 1 kb to about 16 kb, about 1 kb to about 17 kb, about 1 kb to about 18 kb, about 1 kb to about 19 kb, about 1 kb to about 20 kb, about 1 kb to about 21 kb, about 1 kb to about 22 kb, about 1 kb to about 23 kb, about 1 kb to about 24 kb, about 1 kb to about 25 kb, about 1 kb to about 26 kb, about 1 kb to about 27 kb, about 1 kb to about 28 kb, about 1 kb to about 29 kb, or about 1 kb to about 30 kb, about 2 kb to about 3 kb, about 2 kb to about 4 kb, about 2 kb to about 5 kb, about 2 kb to about 6 kb, about 2 kb to about 7 kb, about 2 kb to about 8 kb, about 2 kb to about 9 kb, about 2 kb to about 10 kb, about 2 kb to about 12 kb, about 2 kb to about 14 kb, about 2 kb to about 16 kb, about 2 kb to about 18 kb, about 2 kb to about 20 kb, about 2 kb to about 22 kb, about 2 kb to about 24 kb, about 2 kb to about 26 kb, about 2 kb to about 28 kb, about 2 kb to about 30 kb, about 5 kb to about 10 kb, about 5 kb to about 12 kb, about 5 kb to about 14 kb, about 5 kb to about 16 kb, about 5 kb to about 18 kb, about 5 kb to about 20 kb, about 5 kb to about 22 kb, about 5 kb to about 24 kb, about 5 kb to about 26 kb, about 5 kb to about 28 kb, about 5 kb to about 30 kb, about 10 kb to about 12 kb, about 10 kb to about 14 kb, about 10 kb to about 16 kb, about 10 kb to about 18 kb, about 10 kb to about 20 kb, about 10 kb to about 22 kb, about 10 kb to about 24 kb, about 10 kb to about 26 kb, about 10 kb to about 28 kb, about 10 kb to about 30 kb, about 14 kb to about 16 kb, about 14 kb to about 18 kb, about 14 kb to about 20 kb, about 14 kb to about 22 kb, about 14 kb to about 24 kb, about 14 kb to about 26 kb, about 14 kb to about 28 kb, about 14 kb to about 30 kb, about 18 kb to about 20 kb, about 18 kb to about 22 kb, about 18 kb to about 24 kb, about 18 kb to about 26 kb, about 18 kb to about 28 kb, about 14 kb to about 30 kb, about 20 kb to about 22 kb, about 20 kb to about 24 kb, about 26 kb to about 30 kb, about 28 kb to about 30 kb, or about 24 to about 26 kb.

### Promoters

[0183] In some embodiments, a vector comprises a promoter. The term “promoter” refers to a DNA sequence recognized by enzymes/proteins that can promote and/or initiate transcription of an operably linked gene. For example, a promoter typically refers to a nucleotide sequence to which an RNA polymerase and/or any associated factor binds and from which the process of and/or initiate of transcription can occur. Thus, in some embodiments, a vector comprises one of the non-limiting example promoters described herein operably linked to a coding region.

[0184] In some embodiments, a promoter is an inducible promoter, a constitutive promoter, a plant cell promoter, a viral promoter, a chimeric promoter, an engineered promoter, a tissue-specific promoter, or any other type of promoter known in the art.

[0185] In some embodiments, a promoter may comprise an additional regulatory region such as an enhancer and/or a 5′ UTR. In some embodiments, a promoter may be but is not limited to: 2× CaMV 35S, 2× CaMV 35S+5′UTR TMV, AtAct2, AtSUC2, H4, H4 (S. lycopersicum)+5′UTR, LHB1B1, LHB1B1 (A. thaliana)+5′UTR, Nos, Nos+5′UTR TMV, ocs, ocs (A. tumefaciens)+5′UTR, OsActin+5′UTR, PvUbi1+3, PvUbi1+3 promoter, PvUbi2, PvUbi2_mut, RbcS2B, RolC, rrEaActBlast2, rrEaAs2Blast1, rrEaDPA4Blast1, rrEaH3Blast2, rrEaUbiBlast1, RsS1, RTBV, ZmUbi, or any combination thereof.

[0186] In some embodiments, a promoter is one listed herein as set forth in any one of SEQ ID NOs: 1-48. In some embodiments, a promoter sequence is at least 85%, 90%, 95%, 98% or 99% identical to a promoter sequence represented by any one of SEQ ID NOs: 1-48. In some embodiments, a promoter is a characteristic portion of any one of SEQ ID NOs: 1-48.

[0187] The term “constitutive” promoter refers to a nucleotide sequence that, when operably linked with a nucleic acid encoding a protein (e.g., a metabolic protein), causes RNA to be transcribed from the nucleic acid in a cell under most or all physiological conditions. In certain embodiments, a suitable plant specific constitutive promoter may comprise but is not limited to: a Zea mays Ubiquitin 1 promoter (ZmUbi), an Oryza sativa Actin 1 promoter (OsAc1), a Panicum virgatum L. Ubiquitin 2 promoter (PvUbi2), a Panicum virgatum L. Ubiquitin 1 fusion promoter (PvUbi1+3), an Oryza sativa Cytochrome c gene promoter (OsCc1), an Epipremnum aureum Ubiquitin promoter (rrEaUbil or P1), an Epipremnum aureum Actin promoter, an Epipremnum aureum Histone H₃ promoter (rrEaH32 or P7), a Cauliflower Mosaic virus promoter (2× CaMV35S), a Agrobacterium tumefaciens Nopaline synthase gene promoter (NOS), an Epipremnum aureum ribulose bisphosphate carboxylase/oxygenase activase 2 (rrEaLeaf2) promoter, an Epipremnum aureum Metallothionein-like protein type 3 promoter (rrEaLeaflor P18), an Epipremnum aureum abscisic stress-ripening protein 2-like promoter (rrEaCons3 or P16), an Epipremnum aureum RNA-binding protein cabeza-like promoter (rrEaCons4), or a combination of any characteristic portion of any one or more of these promoters.

-Exemplary Zea mays Ubiquitin 1 promoter (ZmUbi1)
SEQ ID NO: 1
CTGCAGTGCAGCGTGACCCGGTCGTGCCCCTCTCTAGAGATAATGAGCATTGCATGTCTAAGTT
ATAAAAAATTACCACATATTTTTTTTGTCACACTTGTTTGAAGTGCAGTTTATCTATCTTTATA
CATATATTTAAACTTTACTCTACGAATAATATAATCTATAGTACTACAATAATATCAGTGTTTT
AGAGAATCATATAAATGAACAGTTAGACATGGTCTAAAGGACAATTGAGTATTTTGACAACAGG
ACTCTACAGTTTTATCTTTTTAGTGTGCATGTGTTCTCCTTTTTTTTTGCAAATAGCTTCACCT
ATATAATACTTCATCCATTTTATTAGTACATCCATTTAGGGTTTAGGGTTAATGGTTTTTATAG
ACTAATTTTTTTAGTACATCTATTTTATTCTATTTTAGCCTCTAAATTAAGAAAACTAAAACTC
TATTTTAGTTTTTTTATTTAATAATTTAGATATAAAATAGAATAAAATAAAGTGACTAAAAATT
AAACAAATACCCTTTAAGAAATTAAAAAAACTAAGGAAACATTTTTCTTGTTTCGAGTAGATAA
TGCCAGCCTGTTAAACGCCGTCGACGAGTCTAACGGACACCAACCAGCGAACCAGCAGCGTCGC
GTCGGGCCAAGCGAAGCAGACGGCACGGCATCTCTGTCGCTGCCTCTGGACCCCTCTCGAGAGT
TCCGCTCCACCGTTGGACTTGCTCCGCTGTCGGCATCCAGAAATTGCGTGGCGGAGCGGCAGAC
GTGAGCCGGCACGGCAGGCGGCCTCCTCCTCCTCTCACGGCACCGGCAGCTACGGGGGATTCCT
TTCCCACCGCTCCTTCGCTTTCCCTTCCTCGCCCGCCGTAATAAATAGACACCCCCTCCACACC
CTCTTTCCCCAACCTCGTGTTGTTCGGAGCGCACACACACACAACCAGATCTCCCCCAAATCCA
CCCGTCGGCACCTCCGCTTCAAGGTACGCCGCTCGTCCTCCCCCCCCCCCCTCTCTACCTTCTC
TAGATCGGCGTTCCGGTCCATGGTTAGGGCCCGGTAGTTCTACTTCTGTTCATGTTTGTGTTAG
ATCCGTGTTTGTGTTAGATCCGTGCTGCTAGCGTTCGTACACGGATGCGACCTGTACGTCAGAC
ACGTTCTGATTGCTAACTTGCCAGTGTTTCTCTTTGGGGAATCCTGGGATGGCTCTAGCCGTTC
CGCAGACGGGATCGATTTCATGATTTTTTTTGTTTCGTTGCATAGGGTTTGGTTTGCCCTTTTC
CTTTATTTCAATATATGCCGTGCACTTGTTTGTCGGGTCATCTTTTCATGCTTTTTTTTGTCTT
GGTTGTGATGATGTGGTCTGGTTGGGCGGTCGTTCTAGATCGGAGTAGAATTCTGTTTCAAACT
ACCTGGTGGATTTATTAATTTTGGATCTGTATGTGTGTGCCATACATATTCATAGTTACGAATT
GAAGATGATGGATGGAAATATCGATCTAGGATAGGTATACATGTTGATGCGGGTTTTACTGATG
CATATACAGAGATGCTTTTTGTTCGCTTGGTTGTGATGATGTGGTGTGGTTGGGCGGTCGTTCA
TTCGTTCTAGATCGGAGTAGAATACTGTTTCAAACTACCTGGTGTATTTATTAATTTTGGAACT
GTATGTGTGTGTCATACATCTTCATAGTTACGAGTTTAAGATGGATGGAAATATCGATCTAGGA
TAGGTATACATGTTGATGTGGGTTTTACTGATGCATATACATGATGGCATATGCAGCATCTATT
CATATGCTCTAACCTTGAGTACCTATCTATTATAATAAACAAGTATGTTTTATAATTATTTTGA
TCTTGATATACTTGGATGATGGCATATGCAGCAGCTATATGTGGATTTTTTTAGCCCTGCCTTC
ATACGCTATTTATTTGCTTGGTACTGTTTCTTTTGTCGATGCTCACCCTGTTGTTTGGTGTTAC
TTCTGCAG
-Exemplary Oryza sativa Actin 1 promoter (OsAc1)
SEQ ID NO: 2
TCGAGGTCATTCATATGCTTGAGAAGAGAGTCGGGATAGTCCAAAATAAAACAAAGGTAAGATT
ACCTGGTCAAAAGTGAAAACATCAGTTAAAAGGTGGTATAAAGTAAAATATCGGTAATAAAAGG
TGGCCCAAAGTGAAATTTACTCTTTTCTACTATTATAAAAATTGAGGATGTTTTTGTCGGTACT
TTGATACGTCATTTTTGTATGAATTGGTTTTTAAGTTTATTCGCTTTTGGAAATGCATATCTGT
ATTTGAGTCGGGTTTTAAGTTCGTTTGCTTTTGTAAATACAGAGGGATTTGTATAAGAAATATC
TTTAAAAAAACCCATATGCTAATTTGACATAATTTTTGAGAAAAATATATATTCAGGCGAATTC
TCACAATGAACAATAATAAGATTAAAATAGCTTTCCCCCGTTGCAGCGCATGGGTATTTTTTCT
AGTAAAAATAAAAGATAAACTTAGACTCAAAACATTTACAAAAACAACCCCTAAAGTTCCTAAA
GCCCAAAGTGCTATCCACGATCCATAGCAAGCCCAGCCCAACCCAACCCAACCCAACCCACCCC
AGTCCAGCCAACTGGACAATAGTCTCCACACCCCCCCACTATCACCGTGAGTTGTCCGCACGCA
CCGCACGTCTCGCAGCCAAAAAAAAAAAAAGAAAGAAAAAAAAGAAAAAGAAAAAACAGCAGGT
GGGTCCGGGTCGTGGGGGCCGGAAACGCGAGGAGGATCGCGAGCCAGCGACGAGGCCGGCCCTC
CCTCCGCTTCCAAAGAAACGCCCCCCATCGCCACTATATACATACCCCCCCCTCTCCTCCCATC
CCCCCAACCCTACCACCACCACCACCACCACCTCCACCTCCTCCCCCCTCGCTGCCGGACGACG
AGCTCCTCCCCCCTCCCCCTCCGCCGCCGCCGCGCCGGTAACCACCCCGCCCCTCTCCTCTTTC
TTTCTCCGTTTTTTTTTTCCGTCTCGCTCTCGATCTTTGGCCTTGGTAGTTTGGGTGGGCGAGA
GGCGGCTTCGTGCGCGCCCAGATCGGTGCGCGGGAGGGGCGGGATCTCGCGGCTGGGGCTCTCG
CCGGCGTGGATCCGGCCCGGATCTCGCGGGGAATGGGGCTCTCGGATGTAGATCTGCGATCCGC
CGTTGTTGGGGGAGATGATGGGGGGTTTAAAATTTCCGCCATGCTAAACAAGATCAGGAAGAGG
GGAAAAGGGCACTATGGTTTATATTTTTATATATTTCTGCTGCTTCGTCAGGCTTAGATGTGCT
AGATCTTTCTTTCTTCTTTTTGTGGGTAGAATTTGAATCCCTCAGCATTGTTCATCGGTAGTTT
TTCTTTTCATGATTTGTGACAAATGCAGCCTCGTGCGGAGCTTTTTTGTAGGTAGA
-Exemplary Panicum virgatum L. Ubiquitin 2 promoter (PvUbi2)
SEQ ID NO: 3
GAAGCCAACTAAACAAGACCATAACCATGGTGACATTTGACATAGTTGTTTACTACTTGCTTGA
GCCCCACCCTTGCTTATCGGTTGAACATTACAAGATACACTGCGGGTGGCCTAAGGCACACCGT
CCGAAACCGGCAAACCAAGCCTGATCGCCGAAATCCAAAATCACTACCGGCAATCTCTAAAGTT
TATTTCATCCTTATATGACGAGGAAAGAAAAGAAGAGAGAAATAATATCTTAACTTCTAAATCA
GTCGCGTCAACTTTCTCGGCTAAGAAAGTGAGCACTATCATTTCGCAGACCATGTCATGAGTGC
CGACTTGCCATATCTTATTATATTCTTATTTATTTAATTATAATCCCATTGCAATACGTCTATT
CTATCATGGCCTGCCACTAACGCTCCGTCTAACGTCGTTAAGCCATTGTCATAAGCGGCTGCTC
AAAACTCTTCCCGGTGGAGGCGAGGCGTTAACGGCGTCTACAAATCTAACGGCCACCAACCATC
CAGCCGCCTCTCGAAAGCTCCGCTCCGATCGCGGAAATTGCGTGGCGGAGACGAGCGGGCTCCT
CTCACACGGCCCGGAACCGTCACGGCACGGGTGGGGGATTCCTTCCCCAACCCTCCCCACCTCT
CCTCCCCCCGTCGCAGCCCATAAATACAGGGCCCTCCGCGCCTCTTCCCACAATCTCACATCGT
CTCATCGTTCGGAGCGCACAACCCCCGGGTTCCAAATCCAAATTGCTCTTCTCGCGACCCTCGG
CGATCCTTCCCCCGCTTCAAGGTACGGCGATCGTCTCCCCCGTCCTCTTGCCCCATCTCCTCGC
TCGGCGTGGTTTGGTGGTTCTGCTTGGTCTGTGGCTAGGAACTAGGCTGAGGCGTTGACGAAAT
CATGCTAGATCCGCGTGTTTCCTGATCGTGGGTGGCTGGGAGGTGGGGTTTTCGTGTAGATCTG
ATCGGTTCCGCTGTTTATCCTGTCATGCTCATGTGATTTGTGGGGATTTTAGGTCGTTTGTCCG
GGAATCGTGGGGTTGCTTCTAGGCTGTTCGTAGATGAGATCGTTCTCACGATCTGCTGGGTCGC
TGCCTAGGTTCAGCTAGGTCTGCCCTGTTTTTGGGTTCGTTTTCGGGATCTGTACGTGCATCTA
TTATCTGGTTCGATGGTGCTAGCTAGGAACAAACAACTGATTCGTCCGATCGATTGTTTTGTTG
CCATGTGCAAGGTTAGGTCGTTATCTGATTGCTGTAGATCAGAGTAGAATAAGATCATCACAAG
CTAGCTCTTGGGCTTATTATGAATCTGCGTTTGTTGCATGATTAAGATGATTATGCTTTTTCTT
ATGCTGCCGTTTGTATATGATGCGGTAGCTTTTAACTGAATAGCACACCTTTCCTGTTTAGTTA
GATTAGATTAGATTGCATGATAGATGAGGATATATGCTGCTACATCAGTTTGATGATTCTCTGG
TACCTCATAATCAACTAGCTCATGTGCTTAAATTGAAACTGCATGTGCCACATGATTAAGATGC
TAAGATTGGTGAAGATATATACGCTGCTGTTCCTATAGGATCCTGTAGCTTTTACCTGGTCAAC
ATGCATCGTCCTGTTATGGATAGATATGCATGATAGATGAAGATATGTACTGCTACAATTTGAT
GATTCTTTTGTGCACCTGATGATCATGCATGCTCTTTGCCCTTACTTTGATATACTTGGATGAT
GGCATGCTTAGTACTAATGATGTGATGAACACACATGACCTGTTGGTATGAATATGATGTTGCT
GTTTGCTTGTGATGAGTTCTGTTTGTTTACTGCTAGGCACTTACCCTGTTGTCTGGTTCTCTTT
TGCAG
-Exemplary Panicum virgatum L. Ubiquitin 1 fusion promoter (PvUbi1 + 3)
SEQ ID NO: 4
CCACTGGAGAGGGGCACACACGTCAGTGTTTGGTTTCCACTAGCACGAGTAGCGCAATCAGAAA
ATTTTCAATGCATGAAGTACTAAACGAAGTTTATTTAGAAATTTTTTTAAGAAATGAGTGTAAT
TTTTTGCGACGAATTTAATGACAATAATTAATCGATGATTGCCTACAGTAATGCTACAGTAACC
AACCTCTAATCATGCGTCGAATGCGTCATTAGATTCGTCTCGCAAAATAGCACAAGAATTATGA
AATTAATTTTACAAACTATTTTTATTTAATACTAATAATTAACTGTCAAAGTTTGTGCTACTCG
CAAGAGTAGCGCGAACCAAACACGGCCTGGAGGAGCACGGTAACGGCGTCGACAAACTAACGGC
CACCACCCGCCAACGCAAAGGAGACGGATGAGAGTTGACTTCTTGACGGTTCTCCACCCCTCTG
TCTCTCTGTCACTGGGCCCTGGGTCCCCCTCTCGAAAGTTCCTCTGGCCGAAATTGCGCGGCGG
AGACGAGGCGGGCGGAACCGTCACGGCAGAGGATTCCTTCCCCACCCTGCCTGGCCCGGCCATA
TATAAACAGCCACCGCCCCTCCCCGTTCCCCATCGCGTCTCGTCTCGTGTTGTTCCCAGAACAC
AACCAAAATCCAAATCCTCCTCCTCCTCCCGAGCCTCGTCGATCCCTCACCCGCTTCAAGGTAC
GGCGATCCTCCTCTCCCTTCTCCCCTCGATCGATTATGCGTGTTCCGTTTCCGTTTCCGATCGA
GCGAATCGATGGTTAGGACCCATGGGGGACCCATGGGGTGTCGTGTGGTGGTCTGGTTTGATCC
GCGATATTTCTCCGTTCGTAGTGTAGATCTGATCGAATCCCTGGTGAAATCGTTGATCGTGCTA
TTCGTGTGAGGGTTCTTAGGTTTGGAGTTGTGGAGGTAGTTCTGATCGGTTTGTAGGTGAGATT
TTCCCCATGATTTTGCTTGGCTCGTTTGTCTTGGTTAGATTAGATCTGCCCGCATTTTGTTCGA
TATTTCTGATGCAGATATGATGAATAATTTCGTCCTTGTATCCCGCGTCCGTATGTGTATTAAG
TTTGCAGGTGCTAGTTAGGTTTTTCCTACTGATTTGTCTTATCCATTCTGTTTAGCTTGCAAGG
TTTGGTAATGGTCCGGCATGTTTGTCTCTATAGATTAGAGTAGAATAAGATTATCTCAACAAGC
TGTTGGCTTATCAATTTTGGATCTGCATGTGTTTCGCATCTATATCTTTGCAATTAAGATGGTA
GATGGACATATGCTCCTGTTGAGTTGATGTTGTACCTTTTACCTGAGGTCTGAGGAACATGCAT
CCTCCTGCTACTTTGTGCTTATACAGATCATCAAGATTATGCAGCTAATATTCGATCAGTTTCT
AGTATCTACATGGTAAACTTGCATGCACTTGCTACTTATTTTTGATATACTTGGATGATAACAT
ATGCTGCTGGTTGATTCCTACCTACATGATGAACATTTTACAGGCCATTAGTGTCTGTCTGTAT
GTGTTGTTCCTGTTTGCTTCAGTCTATTTCTGTTTCATTCCTAGTTTATTGGTTCTCTGCTAGA
TACTTACCCTGCTGGGCTTAGTTATCATCTTATCTCGAATGCATTTTCATGTTTATAGATGAAT
ATACACTCAGATAGGTGTAGATGTATGCTACTGTTTCTCTACGTTGCTGTAGGTTTTACCTGTG
GCAACTGCATACTCCTGTTGCTTCGCTAGATATGTATGTGCTTATATAGATTAAGATATGTGTG
ATGGTTCTTTAGTATATCTGATGATCATGTATGCTCTTTTAACTTCTTGCTACACTTGGTAACA
TGCTGTGATGCTGTTTGTTGATTCTGTAGCACTACCAATGATGACCTTATCTCTCTTTGTATAT
GATGTTTCTGTTTGTTTGAGGCTTGTGTTACTGCTAGTTACTTACCCTGTTGCCTGGCTAATCT
TCTGCAGATGCAGATC
-Exemplary Oryza sativa Cytochrome c gene promoter (OsCc1),
SEQ ID NO: 5
GAATTCGGATCTTCGAAGGTAGGCTGCAGTTCTTGAATTGTTGAATTATTATTATCTTCATCTT
CATTCATCTGTAACTACTGATTCATCTGGTTTGTTATTACCGATCGTAATGCCGTTGTTTTGTC
AAAAAAAAAAAAGGAGATCGGTTTGTTATTACCGATCATAATGCTGTTCTTTTATAAAAAAAAA
ACATGGATCTATTGGCATAATCTTTTTGCGCCAGGTACTCCGACCATTACTCGGTTACCGACGA
AAGCCGGTGAGATTTGGATAAACTTCGCCAAAAATTTAAATTTCCGTTTGATCTCTCAAACGTG
GGCTGGTTTAGGCCTGTTTAATGTTTAGACACATGTATGGAGTACTAAATATTAATAAAAAAAA
TAATTACACAGATCGTGTGTAAATTGCGAGATAAATCTTTTAAGCCTAATTGCTCCATGAACAA
TGTGGTGTTACAGTAAACATTTGCTAATGACAGATTAATTAGGCTTAATAAATTCGTCTCACAG
TTTACAGGTGAAATATGTAATTTATTTATTATTAAGTCTATATATAATACTTTAAATACGTGAC
CGTATATCCCGATGGGAGACACGTAAAACTTTTTAACCAAGTTCTAAACACAACCTTGCTTCAC
AGTTTCTTGATCTCTATGGGTAGGGGTGGGCAGAAAAAGACCGAACCGAAAGACCGAACCGAAA
AGGCCGAGACCGAGACCGAAAAGATCGAGACCGAGAAATTCGGTCCTAGGTAATGAAAGACCGA
ATTTTGTTCGGTCAATTTGGTTAGTTTTCTCGGGTAACCGAATAGACCGAAAAGACCAAATTAT
CAGAAAATATCTAAATACAATCTACAACCCACTATGTTTAATAGGATTAAACTCTAATTTTTTA
CATCCCTACTTCTTTTAGGCATGCAACCTAATAAGAGTCTTTACTCATAAGTGCTTACGAAATT
TTTTTGTGATTTTTGTGTTGAAAATTTCCATTATTTCTTTGCATATATGAAAATGTTGTTGAAT
TTCGGTCAGGACCGAGACCGAGACTGAATTTGTCAGTCCTAACATTTTTTCACCGAAATTCAGT
CTTCACTTTTCAAAGACTGAAAAGACCGAAAGACTGAAGACCGAGACCGAAATTTTCGGTTAGA
CCGAATGCCCACCCCTATCTACGGGCTTGATAAGATCAATAACCGTAATTACCGAAGCGGTTGC
GTGACTTGCTGTTGCATTTGTCAACCCTAACATAGTACTACCTCCGTTTCAAGGTTCCGTTTCA
GAGTTTGTAAAACTTTCCTAGTATTAACCCATGTTTTAACTTGCAACGGGAGGAAGTTAACATC
CTATACGCCTGAAATCCCTTTAAAAAAAAAGAACATTTATACGCTGGAACCGATTCTGAACCGG
TCCGTCCACCCACCGACCCACCAACGGTGCGATTTCCACCGTCCACCAAACGCGAGCCGCCTCC
ACCCTCCACCTATCGAGTCAAAGACGACGACTCTACCAGAGCACGTGGACCCGGTCCACGAACG
GAACGCCCTTACACCGAATGGGCCGTTGGGTGTCCACGCCTCCCACACCCACACCCCCCTTGCC
TTTTTCTGCAAGACACGGAAACCTTCTGGAACCGCGTGGATTCCCCGAAACGCCCCTGCCCCCA
CGCTCCACCCGTTCAATAATTCTAGGGGTATTATCGTAGTTTCGCCACCTGCCCTTCCGCCGCG
CTGGTGTATACTAGGGCACGCGCTCCTCGGAATCGCCACGAGCCCACGAGCCAGAAAAAAAAGG
AAAAAAAGAGAGTCGTAGTTCGCCTCTTCTTCCTCCTCTCGTTCTCGCGGCGGCGGCGGAG
-Exemplary Epipremnum Aureum Ubiquitin promoter (rrEaUbil or P1)
SEQ ID NO: 6
ACAGAGTAATCCTTCAAGACACATAATAACTCACGAATGTAAAGAACTACAAACACACAAAATT
GTTCAAAAAAATTTATGCAAGAAATTTTTTAAGTTACATTATAGCACATTCACATAAGTGAGTG
TCAAATTGATGGATAATCTCCTATATTTTATAAAAAATTACACTCACATGAGTACATGTTATAA
TCTAATAAGAAATCATTATAGTATATAAATTATTTCTCATGTTTATGATAGCACGCACCACTTG
CAACACGTAAAGTATGTACGTGACTACATGTACAAATCTAAATAATGTTGGGGTAAGATAAAAA
TTTAACAAATTTAACATGTAAATACTTTTGGGTCAGACTTAATGCATCGTTTAAGAAAAGCGAT
GCTGGATCGCACACCCATGATCAAATAATTTCTTGTAAATATCTTTTTGAAAAATTTTAAGTTA
ATTAAATATACTCCCGTTAAAATATTTTTTTATAAAAAATCTGCTACATAAATGTCATTTATAT
CCCCATTGCATATGTATATATACATATATATACCATATATGCTGGTTATATATAAAGAGATATA
TTTTTAACAAAGTAATTATTTTTAACTGACAGTTATTGGTCTGGGGCAAATTTAATTTAACAGG
GTATATATGCAATTTACCCAAAACTTTTTAATCTTTTCCCGTGGGGCGAAGGAGCAGACCGGCT
CCGATCCAAACATTCGCCCTCGTATTCCGTCTCCTCAATCTCTCTCTCTCTCTCTCTCTTTCTT
CGCTCCCTCCTGCAAGCAAAAGCCAATATTTTTCTTCCTCCAAATCCCCCTTTCCTCTACAAAC
AACACCCCTCACTGCTTCTCTTGCTTCTCTCCCCGCCTCAGAATCACCAGATCGCAACTCGATC
TAGGGTTTAGAACCGGTACGTCTCC
-Exemplary Epipremnum Aureum Ubiquitin promoter (rrEaUbi3)
SEQ ID NO: 7
GGGGTGCGACAACATTACCTAGTTCATTAGTGGGACCATCTGCAGATTGAGGACTCTTGGATCA
TCCGAAAGTAGTTCCAGTGCCTTGACTCAGACTTATTAGAGTAACACTAGAGCGGCACCGACCA
TTTCTCGACGGGATCGAGTTCTTTCCAGTTAGGAGGAGTTGGTGGAGACACTAAAAATAGGGTT
CGTTTTGACCCTGGGTGGGTCTGCAACAGACGAGAATGTGCGAAAATGACAATGACATCACTTT
AATTTGGAGACGAGTAGTGGGCCCAGTAAGAATTTTGTGGTGCCATCATTATTAAGCATGTTAA
GGTTGGGAGTCTTTTGATACCTTATTGGGCTTATTTGGGCTTAGTTTTATTTTTTTTTTCTTCA
TATTTTTTATATGATTTTCATGCATTTTTTTATGTGTGAGGAATATTTTGGTCATAAAATGTCT
TTTACAGTTAGAGTTATGAGAGAGTTTATAAATATGTTCTATAACTCTCTTTTTTAATTATTGG
AAAATCTTGTTGCGAATTTTGAGTATTTTATTGTACTCTATGAGAGAGGTTGAGAGGACCGCTA
CTTACGGTCATCCGCGAGAGACGGGGACTTACATTCCTCATCGCCCACCCCTTTGCTGCCTTTG
TGACTGTGTTCCTCGTTAAGAAGTCTGATCCCTGAAAAGTTGCTAAAGATACCTCTATCACATC
TGACGTGTTGTGAGGATCGTAATGGTGTAATCACAACTCAAATCAGATGTCGGACGGGCTTGAT
TTCATACTGGTAGATTCTTTTGGAACCCGTGATTGCACAACGTATGGCTGGGGGGGTACGTGTC
GTCGTGGCACTATGTAAGGCAAGCTGAAGTGAGCATAAACAACAAGTAGACCTCGATGGATGAG
TTTGTCATCTTCAGGCATTCATCAATGTGGACGC
-Exemplary Epipremnum Aureum Ubiquitin promoter (rrEaUbi4)
SEQ ID NO: 8
GCAAGTTGCGTAATCGTGCTCCGTTGCTGAGTGGTTTGTTTTGGACTCCTGGTTCTGGCTCGTC
AGACAACTGGTAAACATAGAAATAATCAACTAAGCTGCAAATTTCCCGCAAGGGAAGTTGGCGG
CAGACAATTGAACTGTAACATTTGAATGTAATGGTTTTTCGGTTGTTGACAGGATAATTTTAGT
TAACACCCCGGCTCTCTCACCCGGAGTTCCTGCCTGTGCCTTGCGGGCATTGGGCTTTTGAACT
GTGTTTGGACTCATGGAATTGCATGAAAACTTGGAGCGTGAGGTTGCACGTTAGAAGTGTATAG
AAGTGCCTTAGGAGTTAGCTCCGGGTGTGGGA
-Exemplary Epipremnum Aureum Actin promoter (rrEaAct1)
SEQ ID NO: 9
TCTGTTGTGACATGTGACGTGAATCTAAAGAAACACTCGCTATTTGCATTATTTTTCTTGTATT
TTCAGTGAAGCAAAGTGTCAAAGTTGCCTATCGTTGGTCAAGATCCTGGATCTGTTGGGGATCT
CTCCTTACATTGCAATTTCCTCTTGTCCTTATTGTTTTAATTTCGGAAAGCGCTATTTGTTGCT
TGCTTTGTTGCAGTTTACATCATCCCTTCTTGATGCTCTTTGGGGGGAAATCTCTCTGGGACAT
TCGATAATATTTGGAAAAAAATAGTCTGCGAGCCAGAAGCCCCAGTGCGCTCTCGTTTGTTTTT
CGTCTCATGCTTCTTAATCTTGTATTTGGCATTTGGGAAGAGTGACACAGGATATGCTATCTAA
TTAGTAAATGAATGTGTTTATCGTGCGGACAACTAATTATTCAGATGGATGAAATTCTTGAAGA
TTTATGTTAAGAATAAATCATTATGCAATAATTTCCTAAATGTCAATTGATATTGCATCGGATT
TCACATGCACCAGTAAAACTAGTACTTACCTGTGGTTCATGACAAACACGATTTTTTTTAATTT
TTCTAATGCAATTTACTTTTTCTGCTCATACTTTCTCTTAAAGTAACATCCATCTCCACTTGTT
TTTTTTTCCTTTCTCAAATATATCTTGATCCACACTTACCGACAAGCCTGTACTGGTTTATCTG
ATTGTTAAATTTGATGTTACATTTGAATGGGAAGAGATATCATGTTAGTTCGGTTCTAGCATTA
AAATGCCTAGTACATCTTACTCCTTTTGCAGAATGACTTTCTTTATACATATGGTACGTTATTT
TTCTTGAAATGGAGCTTGCCCAAGCAGAATTTCTTTTTTCATGGATGATGGTTGTCGTTGGTAG
TTTAATTTTATCATTAACCTTTCACGTCTTACATATTTCTCAGATATTGGTGAATATTTTAATC
TGAAACGTAAAGTGAGCAGGTGTAGA
-Exemplary Epipremnum Aureum Actin promoter (rrEaAct2)
SEQ ID NO: 10
ACACCATCACCCTCATTGGTTTCTGTAGCATGACTCTGAGCTACGATGGAAGATCCAAGTTCCA
AAATAAAAATAGTCCCTGGTGTCACTATTGGGTCGCTCAAGCAAGGCATATATTGTCTAAGTTG
ACCTGAAAATTGCATGACCAAATCTGATTCCCGCTCACGGCCCTGTCCGCGACGTCACTCGTGA
AACTCCCTATTAGAGGGAGAGTGGAGCATCATGCTTGGAAGCTAAAAAAAAATGGATGATGTCA
AAATTCCAAACTAACAATAAGTAATGAGCTGTATTGGGCAAATAATACTAATATAGAAGTAGTA
AGTAAAAGAGAGAGAAAAAAGAGTCAATAAAAAAAATGCAACAAAAGGTTTTGTGCTTACCGAC
CGCTGTCCGTGGCACTTCCCGGTTCGTGGGGGACATTTGTTGGCAAATATCTTTTTTATTATTA
TTCAAAAAAAATGAAAAGGAAGGGAGATAAGAAAAGACAAGAGACTGCTCTCCCACACCTTAAT
GCAACTCAGGTTGGTTCACTTATGGTGCAACACAAGGTAACCTGCAATCAAAAGGTCTGGGCAG
CTGGATTTTGTGCTGTCTTACTTTAGAAGCACAACTCTTTGACATATGCTTTGGTGGAATTTAT
CAAAGGAAAAGCTCCTGATGTTGTAAACAGTGGGTCAATAACACAACAGGCTAAAACAGATTTC
ATGAAAAATTCATTCTCTGGTCTGCTATAGAAAAGTTCTTCACAGTGATTTTGGGGCTACCAGA
TGTTCAGAGGTGGTATTCAGCTAGCGGCAATTTCAAGCTGGGTTGCAGTTTGAAGGCAGAAAAG
AGACAGGCTGTTCTTTGCCTGATCAGGGATTGTCCCCCATCTCTCTCCCTCTGTCTTTTCTCTC
CCTCCTGCACTCCCATCAGAAAATAGCAGGGAGAGAGAGACTGATGGGTCTTTCCCTCTCTCAC
TGATTTTTCCCTTTCTCCTGGTTTTCTCT
-Exemplary Epipremnum Aureum Histone H3 promoter (rrEaH32 or P7)
SEQ ID NO: 11
ATGGCTGCATTACCTGACGTACAATATTATTGGTAGGTAATTCGAGATTAACTATGAAATATGT
ATATGTGTCTCACAACTAAGTAATGGCCAACTTAGTTAACCAGGTTATGAACAAGTTAAAGTTG
GTGTCAAACTCTGGATTAACTTCAGAGTAACCACTCTCTACTTAGAACCCAAAACTTATGTAAG
TTAATACTAATGAGTAATCTCTGGACTAACCCACCACACCAATTCATGACTTTTGGAAGAAAGA
TTACTTATTAATCCGAATAATTTGGACCCCCTTTTTGAAAATAATTATTGAGTTAATTCTGAAC
TATTAAATATTTCATATTATTAATAATCATTTTAAATAAAAGCTGCTGATCTTAGTTGTAATTT
TTTTTACTATTAACAAAGAGAGAGATAAACGCATTTTTTTCTATTTTTATACCAAAATTAACCC
ATATTCAAATTTTGGGGATGACACATGAATTAAGCTAGTTTCTCATTAGAAAAAGATCTTAGCC
TTACTTATTAGGGGTACATAGATAATTTAATTTTTTTAAATGTTTTCACGTAATTTCAAACCAT
TTAGGCCAAAGCGGGCCGAATTCAAATTCGTGGGCTCGGTGTCACGTTGGTCCAGCCAGAGCAG
TGTTATCAGCTTCCTACCTGGTGAAGGTACGCCATTGGCTGTTGTCCGACGACGCGGATCAAGT
TGCATAAACAAATTCGCACCGTCCGATGAAAGCGAATGATCCCGATTCACTCAAGGGGCCCCCG
CTGCGGCAGCGGCGGAGAAAATTTCGAACTCTCCGCCAAAAGGGCTCCTCTCTCTCTCTCTCTC
TACAAATACTCGCCAAAGGCTCCCCCTTTGTTCTACCCAAGCAGTCCTCGCTGCTCCAGATCGA
GAGGCATCCAGAGAGCGTCCGAAAGAA
-Exemplary Epipremnum Aureum Histone H3 promoter (rrEaH31)
SEQ ID NO: 12
TGTTACAAAACAGAAGAAATTTGACATATGTGTTGAACATAATCTTGTCCTAATATTTTTTTAT
TTTTTTTAAAATTTTAAAGTACTTAAAAATATTATCTCTTAAAATCAACGTCCATCACACAATT
TGTAAATTTGGACCAAGTCAACCTGAGTTGATTGACTTAGTTCATATTCAATTATTTAGTATAT
ACGATTCAATACAAATTATTTAAATAATAATATAATATTTAAAATATAATTTACATATTTTATA
AAAATTAAAAATAATAAAAATTTAAATATGTGACTTAATAAGTCACAAGAGTTTTGATATGTGG
ATAAAAGTTTCTATAGACAAACAAGATTTTTTTGAATAAAAATTATCTACTAAATTGTAAAAGT
TTTATGAGATTTTAAGATTTGTTATTTATAAACATAAAATTTTTAATGTTAAATAAAATAAAAT
AATTGATGAAAATTTAAATTATCCTATTATATTGTCAAAAAATTCACAAGAGAAGAGTGGCAGT
CAAAAGTTATCCTCGAATTATTTTCTTAATATAGATAAAAAAAAGATCTCGAGAGAATTTAAAA
TTTAGAAACCCCTGGCCCACCCTAGCCCAGAAAGCTCGCCAGCCGCGCTGGCCGGGCCCGCACT
TACGCTCCCAAGAGGGAGCTTGGCCAAGGTCGAAAGTGACGGCGATCGCGATCCGCGTGCTATT
CCTCAGGATCATCTCAACCGTTCTTTGAGACAAATCGACGATCTCGACTAACCACCGAGAAATT
CAAAAGTTCCAAAACCGGCTCCCGCCTTTCGTGCGCCTACAAGTATCCATCCCTTCCCTCAGGG
CTTGAATCGTCTCCACCCCTCCGAACACAAAGCATTTCCTCCTGCTGCACCGAAACCCTAGGCC
CTCGTTC
-Exemplary Cauliflower Mosaic virus promoter (2x CaMV35S)
SEQ ID NO: 13
GTCAACATGGTGGAGCACGACACTCTGGTCTACTCCAAAAATGTCAAAGATACAGTCTCAGAAG
ATCAAAGGGCTATTGAGACTTTTCAACAAAGGATAATTTCGGGAAACCTCCTCGGATTCCATTG
CCCAGCTATCTGTCACTTCATCGAAAGGACAGTAGAAAAGGAAGGTGGCTCCTACAAATGCCAT
CATTGCGATAAAGGAAAGGCTATCATTCAAGATCTCTCTGCCGACAGTGGTCCCAAAGATGGAC
CCCCACCCACGAGGAGCATCGTGGAAAAAGAAGAGGTTCCAACCACGTCTACAAAGCAAGTGGA
TTGATGTGATAACATGGTGGAGCACGACACTCTGGTCTACTCCAAAAATGTCAAAGATACAGTC
TCAGAAGATCAAAGGGCTATTGAGACTTTTCAACAAAGGATAATTTCGGGAAACCTCCTCGGAT
TCCATTGCCCAGCTATCTGTCACTTCATCGAAAGGACAGTAGAAAAGGAAGGTGGCTCCTACAA
ATGCCATCATTGCGATAAAGGAAAGGCTATCATTCAAGATCTCTCTGCCGACAGTGGTCCCAAA
GATGGACCCCCACCCACGAGGAGCATCGTGGAAAAAGAAGAGGTTCCAACCACGTCTACAAAGC
AAGTGGATTGATGTGACATCTCCACTGACGTAAGGGATGACGCACAATCCCACTATCCTTCGCA
AGACCCTTCCTCTATATAAGGAAGTTCATTTCATTTGGAGAGGACA
-Exemplary Agrobacterium tumefaciens Nopaline synthase gene promoter
(NOS)
SEQ ID NO: 14
GAACCGCAACGTTGAAGGAGCCACTCAGCCGCGGGTTTCTGGAGTTTAATGAGCTAAGCACATA
CGTCAGAAACCATTATTGCGCGTTCAAAAGTCGCCTAAGGTCACTATCAGCTAGCAAATATTTC
TTGTCAAAAATGCTCCACTGACGTTCCATAAATTCCCCTCGGTATCCAATTA
-Exemplary Agrobacterium tumefaciens Octopine synthase gene promoter
(Ocs)
SEQ ID NO: 15
CTGAAAGCGACGTTGGATGTTAACATCTACAAATTGCCTTTTCTTATCGACCATGTACGTAAGC
GCTTACGTTTTTGGTGGACCCTTGAGGAAACTGGTAGCTGTTGTGGGCCTGTGCTCTCAAGATG
GATCATTAATTTCCACCTTCACCTACGATGGGGGGCATCGCACCGGTGAGTAATATTGTACGGC
TAAGAGCGAATTTGGCCTGTAAGATCCTTTTTACCGACAACTCATCCACATTGATGGTAGGCAG
AAAGTTAAAGGATTATCGCAAGTCAATACTTGCCCATTCATTGATCTATTTAAAGGTGTGGCCT
CAAGGATAATCGCCAAACCATTATATTTGCAATCTACCA
-Exemplary Agrobacterium tumefaciens Mannopine synthase gene
promoter (Mas)
SEQ ID NO: 16
ATTTTTCAAATCAGTGCGCAAGACGTGACGTAAGTATCCGAGTCAGTTTTTATTTTTCTACTAA
TTTGGTCGTTTATTTCGGCGTGTAGGACATGGCAACCGGGCCTGAATTTCGCGGGTATTCTGTT
TCTATTCCAACTTTTTCTTGATCCGCAGCCATTAACGACTTTTGAATAGATACGCTGACACGCC
AAGCCTCGCTAGTCAAAAGTGTACCAAACAACGCTTTACAGCAAGAACGGAATGCGCGTGACGC
TCGCGGTGACGCCATTTCGCCTTTTCAGAAATGGATAAATAGCCTTGCTTCCTATTATATCTTC
CCAAATTACCAATACATTACACTAGCATCTGAATTTCATAACCAATCTCGATACACCAAATCG
-Exemplary Cassava Vein Mosaic Virus promoter (CsCMV)
SEQ ID NO: 17
CCAGAAGGTAATTATCCAAGATGTAGCATCAAGAATCCAATGTTTACGGGAAAAACTATGGAAG
TATTATGTAAGCTCAGCAAGAAGCAGATCAATATGCGGCACATATGCAACCTATGTTCAAAAAT
GAAGAATGTACAGATACAAGATCCTATACTGCCAGAATACGAAGAAGAATACGTAGAAATTGAA
AAAGAAGAACCAGGCGAAGAAAAGAATCTTGATGACGTAAGCACTGACGACAACAATGAAAAGA
AGAAGATAAGGTCGGTGATTGTGAAAGAGACATAGAGGACACATGTAAGGTGGAAAATGTAAGG
GCGGAAAGTAACCTTATCACAAAGGAATCTTATCCCCCACTACTTATCCTTTTATATTTTTCCG
TGTCATTTTTGCCCTTGAGTTTTCCTATATAAGGAACCAAGTTCGGCATTTGTGAAAACAAGAA
AAAATTTGGTGTAAGCTATTTTCTTTGAAGTACTGAGGATACAACTTCAGAGAAATTTGTAAGT
TTGT
-Exemplary Arabidopsis thaliana Actin 2 promoter (AthAct2)
SEQ ID NO: 18
AGGAGTCGACAAAATTTAGAACGAACTTAATTATGATCTCAAATACATTGATACATATCTCATC
TAGATCTAGGTTATCATTATGTAAGAAAGTTTTGACGAATATGGCACGACAAAATGGCTAGACT
CGATGTAATTGGTATCTCAACTCAACATTATACTTATACCAAACATTAGTTAGACAAAATTTAA
ACAACTATTTTTTATGTATGCAAGAGTCAGCATATGTATAATTGATTCAGAATCGTTTTGACGA
GTTCGGATGTAGTAGTAGCCATTATTTAATGTACATACTAATCGTGAATAGTGAATATGATGAA
ACATTGTATCTTATTGTATAAATATCCATAAACACATCATGAAAGACACTTTCTTTCACGGTCT
GAATTAATTATGATACAATTCTAATAGAAAACGAATTAAATTACGTTGAATTGTATGAAATCTA
ATTGAACAAGCCAACCACGACGACGACTAACGTTGCCTGGATTGACTCGGTTTAAGTTAACCAC
TAAAAAAACGGAGCTGTCATGTAACACGCGGATCGAGCAGGTCACAGTCATGAAGCCATCAAAG
CAAAAGAACTAATCCAAGGGCTGAGATGATTAATTAGTTTAAAAATTAGTTAACACGAGGGAAA
AGGCTGTCTGACAGCCAGGTCACGTTATCTTTACCTGTGGTCGAAATGATTCGTGTCTGTCGAT
TTTAATTATTTTTTTGAAAGGCCGAAAATAAAGTTGTAAGAGATAAACCCGCCTATATAAATTC
ATATATTTTCCTCTCCGCTTTGAATACTGTATTTTTACAACAATTACCAACAACAACAAACAAC
AAACAACATTACAATTACTATTTACAATTAC
-Exemplary Solanum lycopersicum Histone H4 promoter (SlHis4)
SEQ ID NO: 19
AGGAGAATATCATTTTTAAGTAAAATTTTGAATTCAAATGTTACGTGTATTATTTAATTCATCA
ATTTGCCTTGTCATAGCGAGTACATTACAAACATCACATATATTTGATTGATTGTCAAAAAATA
TCAAAATATATATCAATTTTAAGAGGTATAGGTGTCTAATATGTACTAGCCCTAATTTAAATAT
CTAAATTAATTATTCGGATGAATCTATATACCATCTTTTTAATGGACACCCAAAATCACACATC
AAACATCATATACATGTTGAAAACATATTATTGATATAGCTACATATATGTTTTAATATAAATA
AAAGACGAGTCATATATTCAAAAATTAAGAATCAAATAATTTTAATTTATTTAATATTCAAAAC
TTAATACTATTTAAATTTAGATATTCTAATTTTAATACACGTCTGATAAAATAGATGAGGACTA
AATAAATAATTTGAGACTATCTTTTCTTTATTTGGCGGCCCACAAATAATTTAGATTCTCGTAA
CCCCCTCTTTTTCTCTCACTGAAAAAGCACAATCCGTGTCCAAACACAAAGAAGCACTCGACAC
CGTAGATCTCCATTCAGATCAACGGCTTATATTCAGTTTTCTCCATTCACGTGGATCGACATTC
TTATCCGTCCGATTATCAATAAATTTCCCAAAATTTAGCGGCCATGATTTTAACCCCGCCTCAT
TTCAAACCGCCCACGAAATCCTCGACGCCCAAATTCACCAACTATAAATAGCCACCACCATCCC
CTTCATCAATCATCAAATTTCATAACCCTAGAATCATCACCTTTTTCAAATTTC
-Exemplary Arabidopsis thaliana Light-harvesting chlorophyll-protein
complex II subunit B1 Promoter (AthLHB1B1)
SEQ ID NO: 20
AGGAGATATGACTGGTAAGTTTTTCTTGCCAATACGAATTAGAAAACATGTCTTTGAAGATGAA
CTGTATTTTTTTTTTTTACTTTGTTGTCATTTTAATGTACTTTCTTATCAGGATTAAATCTTCT
GTAATTTAGAGTAGTTTTTTTAACAAGATAATTAACAAACTTAGAGTAATGAAAATTGAGATGT
TCAGTTTTCACTCATATTTCACATTTTGGTGAAAGAGTGGGTAGTATGCAACGTTCTAAGTATG
TTTGGACTTTGTATCATGTTGTTTTGATTCTTTGACGACATGTCTATTTGGGAAACACCAATGA
CGTGTACCTTGAGACTGATACGATTCAAAGGGATAGAAACACGTCAGATTTACAAGTGGCACCT
CTTCAATGGACAATGGGTATTCCAATATGCTAAGATGCTACGAGATATCTAATTTATCTAACAC
AACTCAATTCCAAACCAAAAATCTGATGCCAGCTCGACAAGACAAAAAATCTAAGCTCAAAAAT
GTCAACAACCAATAGAAATCAAGGCATTGACGATATCACGAGATAAGCAAATTAAATCTTCAAG
TTTTGCAATTCATATGTACGTTATAAATACCCAAAAACCTCACCGTAACCTAGCTATCCAATTT
CATCACATCTTATTAACTAAAGAGCCTTTTACTTGCGCCACACTCTCACCGC
-Exemplary Epipremnum aureum ribulose bisphosphate
carboxylase/oxygenase activase 2 promoter (rrEaCons1)
SEQ ID NO: 21
ACCTCAACCTTCGCTCACAGTGAAGGCTTGAAACTCGCTTTTTAACATTGTAAGTGGGCTGATT
TTGAACTCATCTCATCGTAAATCTTTAAGCTTTGACTTCCCACGATGTTGTCCAGTCTATTAGA
TTTTTTATGGTTTTTTTTTCTTTTTTCGCTGAAAGTTCCTACTTAAAATAGTCACCCACTAGGT
ACAGAAGAGTCAGCTACATGAAAAATACCTTAATATAGAAAAACGTATTTATTGTATTAAAATT
TGAACCCTCCCCACTTAAAATGATGCGTACCACTTAGACCTAGTTGAGATTTATTGTTGCACCT
GGGAGAGAGTTGAATAGGGTCCGGATTCCCACTTAGTTTCTCTGGAATCTAGATAGGGCGGTCA
GCTTTATCTTAATTAGTGACAAGGCACTAGTTGGAGTTAGTTTTTATATTGAACATACTCTTAA
ACTTTTAGTTCCCTATTTTGAGAGAAAGTATTTGAAGTAATTTTAAACTTTTGGTTAAATCTTC
CACTTTTGACCAAAAGTTCAAAATTAAAGTTTCCCAAGTTCAAGAAAGAATGGTATCATTAGCC
CATATAAGAACTAAATTAAAATCAGTTTGATTCATTCTTATTAAGCTCCAACATACTCAACAGC
ACAACCAACAGCATGACTTGTGTAAACTGAAAAACTCAGAGAGAGAGAGATAGAGACTCTGAAC
GAGTGGTGCTGAGCAGCAGTGGCTGCTTCATGAAGAGTTTGGCGTGACGACAAAACCATCAAAA
ACACAGAAGAGGAATTTCATTGCCGACAATCACCATGTCTCTGTAATACTGCTGGTCCTGATGA
AATGCTTGAAGGAAAAAAAACTGGCATTAAAGAGGAGGGGAAAAAACCGAAAATTTTAGTGGAG
TCGGGAAGCCCGGGAACCCGAACCATTCCTGGCGTCTGACGTCCTCCGCTGCCGAGAGGATGCT
GTAGCTGATGGGCCCCACTTCCCCACACTCCCCAACTTCCAACGTCAGGACACGACTCTATCTG
CGCAGAAGCAACCAACCCTGATGCGCCACGTGTCGCCCCACCCCAATCCGCAGTGTGTGGCCGT
TGTGGCCCTCGCGATCCAATCCACAGGATGCTTCACTCTCCTCCTCTCCTCCGCAAGCCAAACG
GGAAAATAACGGAGCAGGGCAGACTCCAGAGCCTCCGCAGGCCGCTTTATATATAACTCGCCCT
CCCACGCCTCCTACGGTCATCACTGCCGCGAGGAGCTTTGCTTTTGGTGGACGCGGCGATCTCC
CCCCATCTCCTTCTCGGTCTTCC
-Exemplary Epipremnum aureum Metallothionein-like protein type 3
promoter (rrEaCons2)
SEQ ID NO: 22
AGGAACAAGTGCCACCTGAGCCAAGGCGCTCATTGGCGTCTTGATAGTTTCTTTTATGGTATAC
ATGCTGTTGTAAGAATCTTAATGTTTTAAATTTGCATCTGCATGTATATATCCACGTTTTGGTG
TAATATCCACGTCTATACCCTTGTGAAAGGTATCTGTATGCATCCAAGTATAGTTAAATCACTT
TTTAAAATTTACAGCTATGTCCCTTGTAAAGCTATAATGACATTTTTGTGCATCTAGAAAGAGT
ACTCACTCGGGGACTCTTCTAACAGACAAGCACATGATGAGAAATTTGCACCCGCACAATTCAA
ATTTGATTCTGAAAGACTTGCAACTTACAAACTATCTTAAGTACGTACGACCACAAATTATCTC
AAGTGTACTCTTTGTTCCACAAATAACTTTTACATTGACACTATTTAAGGACGACACTGATCAG
AGATAAAATGACAAAATGAAAGGGGACTCATCTAAGTTAGACAAATCCCGAAACTTATTTCATA
TACCCTAAGAACACTTGCCCCCCTAATTAACGACGGTACATGAGTAACATGTTTGCTTTTCACA
TGAATACAAATGGCAGTACATATATGTAAGCTAGCAAGAAGGATATGTGGGTGATAATTATCTG
TATATGGTCCGTATCCACCTCCCTCTCTAGTATCTCCATCACGTAGCCAGAGGTCATCGGATTT
GTACACCAGTTGCATGTGCCTGTGCATCTGTTGCCAGTTGCGTGTGACAGTGCAGCTGTGTATT
GCCACAAAAAAAAAAGGAATAAAAAGGTAGTGCAACTGGGTAACGGTGCAAGGATAGCCGTGTC
TGCCCATCTGAACCCAAAAGGGCGACGACGACGACTCGGGGAGGTGAAAGAAGAGGAACTGGCG
TGAGAGCTGGTGGGGCAGCCCCCCTCCTCTCCACCATAATTGAGATTCCTTTGGAAGCTTCCCC
CATGGAGGCGTGTGCCCGTCACACACAGGAGGCAGAAGCCCTTCCCCTCCATCTCTCCTTGTGC
CGTGTGCGGCTGCCCATCCAACCCCTGGGGCCTATAAATATCGTCGCAGGGGCAGAAGCCCCTC
CAGCATAGCTGAAGCTTGAGTAGTTCAGAGATATAGCTCTCTTTGATCTCCAGAGAGGCTCCCT
CCTGACATCACCACC
-Exemplary Epipremnum aureum abscisic stress-ripening protein 2-like
promoter (rrEaCons3 or P16)
SEQ ID NO: 23
GTTCCACTCGAGGCAGGAAAAATCTCTGGATTTGGACACTTAACCGACCCCCATTAACACCCCA
CCTCACATCAGAGCACGGTTTGCCCACTCAACTTGTCAGGCAAACCACATCTTATCTCAAAAGC
TATGAGTTACAACGTCAGATAACTAATTTAAATAATAATATAAATTTAAAATATAAATTATATT
TTTTATTAAATTAAAAGAATAATATTTTTTAAATATCTAATTTTATCCAATCAAATTCAAGTTC
AACTGATCTATATTAAATAAAAAAATTAATACGAATCCAAATTTTAAGTTGACAAATAAATGAA
TTTTGAATAAAAGAATCACAAATAAAAAATTACGTTTTCTTGGCGTATATCACCATGCTTGTCT
TCGTTTAAGAGATTTAAGCAATCATGGACGTCTGCTTATCCACGGATGTGAAATATTAAATGAT
AAAATACTATATTATCTTATATTATAGAAAAATAAATTTTAAATGAGAAGTGGGTATTTATTAT
GTTTTCATTCAACATACGTGCGAAAGTTTTATCTAGATAGATTAGCGTTAGCATCACTCAAGAA
TTTTTTTTATTTTCTTAACTGCTTCAAAAAAAGAAATATAAAGGGATTGGCCCACGTTAATTAG
CTAGAAAAAGTGGGATTGAAACGGGTGTTATCCACTTCACATTCTGTGAGCGAATCCGATGCGT
GAAGCCCCGCCATCCTGACCCGACCGCTGTTCCCCCCTACCCACGAAGAAGCCGTCTGTCCGTC
TCTTCAATCTCTATACTTCCCCTTCGCCTGCTGCGTACACTCCCGTGGCTATAAATAACCACCA
CAGCCTCTCTGATTTCTTCGTACCCATTACTGCAACACCTCTACAGCTACTAGCCGTGTCGCCC
GCCCCCCCTTAAGGTCATTCTACCACTGCCAGT
-Exemplary Epipremnum aureum RNA-binding protein cabeza-like
promoter (rrEaCons4)
SEQ ID NO: 24
GCAACAATGACGCGGATTCAGCCCGCCAAACAGATACCATTAACTCGGTTCACTTGTTTAAGAA
AGCGTTGTAGATTTTTTTTTAAAATTTATTAATAAAATTTTACCGCCCCCAAAGCCCAAACTAA
TGTTATCAAGTTGGAATCTGAAAAAAAAATAGATTCGAGAGAAAGATATTAATTCAATCAAAAT
ACAAATAATTCATGAAAGGTTCTGAATGTATCGTCGATCTTTAATATAATTAAATATTAATTGT
AAATCATATAAAAACTATTAATTGACTAGITCCAATAGCCAGTCCTTGTCACTCTTGGCTGCAT
TGCCGGGTATCGGATATTGGCACCGCGGAGAACGCGAGAGGTGCCTCACCGCCAACATGGAAGG
CGCTTGCGCCTTTCGGTTGACTCCCGAGGTAAACAAGGGGCCAGGGGCATCCACGTAAACACGC
CCTCCCCCGGGCCCAGGGGTATCCACGTAAACACGCCCTTCAGATATGTCTGTGTCGCTTGCGC
GGTCCCCGCCCCGCTCGTTCCCTTCCCTGTGATAAGCACAAAGCCACGAACCCTGTTCTGGGCC
TAAACGGGCCACCAAACGATCGGGGGATCCAATCCAGCACGAGTTCCACTGTTCCCTCACCCCA
TCTAAATCTTAATTTGCTCCAGCTCCACGAGGGTACCATTACACAGCTCCCGAAAACGTCCACC
AGTTCGCACAGGCTCGTCGAGGGGAACACGATAGTGTCTAGTGCGGGGTCCATGGGCCCATCCA
GTACTGCCGGCCAGTCCACGAAGCCCAACGGGGACCCTGGTTGAACCCAAGCGTGGGGTTACAA
ACGCTCGAG

[0188] In certain embodiments, compositions and methods described herein utilize an inducible promoter. Inducible promoters allow regulation of gene expression and can be regulated by exogenously supplied compounds, environmental factors such as temperature, or the presence of a specific physiological state, e.g., acute phase, a particular differentiation state of the cell, a particular growth stage of a cell, and/or in replicating cells only. Inducible promoters and inducible systems are available from a variety of commercial sources, including, without limitation, Invitrogen, Clontech, and Ariad. Additional examples of inducible promoters are known in the art.

[0189] Examples of inducible promoters regulated by exogenously supplied compounds include the zinc-inducible sheep metallothionein (MT) promoter, the dexamethasone (Dex)-inducible mouse mammary tumor virus (MMTV) promoter, the T7 polymerase promoter system (WO 98/10088, which is incorporated in its entirety herein by reference); the ecdysone insect promoter (No et al, Proc. Natl. Acad Sci. US.A. 93:3346-3351, 1996, which is incorporated in its entirety herein by reference), the tetracycline-repressible system (Gossen et al, Proc. Natl. Acad Sci. US.A. 89:5547-5551, 1992, which is incorporated in its entirety herein by reference), the tetracycline-inducible system (Gossen et al, Science 268:1766-1769, 1995, see also Harvey et al, Curr. Opin. Chem. Biol. 2:512-518, 1998, each of which is incorporated in their entirety herein by reference), the RU486-inducible system (Wang et al, Nat. Biotech. 15:239-243, 1997, and Wang et al, Gene Ther. 4:432-441, 1997, each of which is incorporated in their entirety herein by reference), and the rapamycin-inducible system (Magari et al. J Clin. Invest. 100:2865-2872, 1997, which is incorporated in its entirety herein by reference).

[0190] In certain embodiments, a suitable plant specific inducible promoter may comprise but is not limited to: an Epipremnum aureum leaf patterning promoter, an Epipremnum aureum leaf age dependent promoter, an Epipremnum aureum salicyclic acid stress responsive promoter, an Arabidopsis thaliana stress response promoter, an Epipremnum aureum auxin signaling responsive promoter, or a combination of any characteristic portion of these promoters.

-Exemplary Epipremnum aureum leaf patterning promoter (rrEaAs21)
SEQ ID NO: 25
GCTCCGTCCCTTTTCCCTTTTCTTTCCATTTCTACCATGCGTGTCAGCGTGTGCGTCCATTGCT
CGAACTGTGTCTGCACGTGTTCATGTGATCATCAGAAGTCTTGTTCGCAGGCCCACCGTTTTCG
ATTTGGAGATCCCCGGACATAATCCGGAAGAGATCTTCTTTTTTAGCACATGAACATACAGTAA
TGCGAGAATGGAAGGAGTGAGAAAATATCCTTTGAATCCCGGTTGCATCCCGAATCCTACCGAG
AAAGAGAGGATCTCTATCTCAAGCAGTGTAAGAAGAGCTCACGGTGGTCTTTCCCGATCATGTC
CGGAGGCATGTGATCTCAAGTGCTGTGGTGCAAGTAATCCCCTTAGAAGGTTATGATCTCCGTT
CCGTATCCATCACCGTCTTTCGTACTTCATGGGTTTCTCTTCCCTTCTCTCTCCTATCCGTGTA
TCTTCTCAGATTTGTATGGGAGATACTGTATGGGGAGGAGTAGAGTCTGGGTTGTATTCAGTTC
CCTCCATTGCCCTTTTAGACAAGAGAAAGGAAAAACAGTGAATTCCATGTGTTCTTCTGTCCAA
CCGTGTCGCCTTGCTGCGAATAGTCCTAGCAATTGCACTGTTGCCATGCCTTCCTGTCACTGTA
AGATGACACTCTACTCTGTGTGTCTTTTTTGGTATTATCTCTAAGGGCAATCCGCACACGTTCC
CGTTCATTTACTTCATGTGGAAAAGAAAAAAGTTTGTTTCTTTCTGAAAAAAATCATGGAAGAT
AATTGTTTTGCCCACTCATTTGCTACTATATATTCTACCTTAATTTGTTTGCAACGGGTCAGGT
TGTTTAAATCTGACTGTTTAAAGGCTCTATCTTTTGGACAGGAATTGATCATATATAAGCAGCC
GTGTGTGGTT
-Exemplary Epipremnum aureum leaf age dependent promoter
(rrEaKan22)
SEQ ID NO: 26
CCATCGCTATTCTTGTATTGTCACGAATGCCACCCCTAGATAATTTATTTGTGAAAATATCTTT
GAAATACAATTTTTGTGCATAAATTCTCAAAAGATGGCATTCATATGAGAATAAGGGTGACAAA
TGCGTAATGTAACAATGACATATTTGTAAAAAAAATTCATATCTAATTTTCCAACATTAATCTA
TCTAAAATATTATAATATCATATCTAATAGATGTTGACCATACGTGAGGCATTTGGCACTAGGC
CTACCCAAGGAGGATGCAAATGTGTTTTTAATGGAGTTACTTTGCACATCTTTTATACAAGGGG
GGCATCGTTACAAAAACTCAAAATTAACTTGTGAGAGGCCGGCTTTATCTTTTTATGGCCCGTA
AAGCGGAAATATGAGAAGTGGAGAAATGGAATAGGAGACAGGAAGGAAGGGATGCACACAAAGC
TAAAATGTTAGATCAGAACTTCACTTTTTATCAAAAAGAAAATCAGTGGGAAAAAGAATAAAAA
AAAAGAATCGAAGCCTTCTCTCTCTCTCTCTCTCTCTCTCTCTCTCTCTCTCTCTCTCTCTCCT
TCTATGTGTGTTTGTCCACACCCCACGTCCACAAAAGAAACATACTCCTACTTTCTCCTCTATT
TCTCTCTCCTGGCAGCCAAGACCATTCATACCGAGTGTCATTTTCCTGCACATACTTCCCCTTC
ATACAAGAAGTAACCACTTCCACTCTCCCCGTTTCAAGACATTTACCTCCCCTCCAATCCCTCG
TTCCCCAACTCCCCTCCCAAAACCTTCCTGTTCATCTAGAACACCCATCTGCTCCACACCTCCT
ACCCTTCCCACACTCCCAACGGGAAGAAGAACTCAGTGTACGAGAAGAAACCCAGAGTCCCGTC
TGCGGCGGCGCAGGCGGAGGGTAGGGAGGGAGGGAGAGAGAGAGTGAGTGTGTGTGTGTGTGTG
TGAGAGAGAGAGAGAGAGGT
-Exemplary Epipremnum aureum leaf age dependent promoter
(rrEaDPA41)
SEQ ID NO: 27
TGCTCCAATTACATTTGCCATCTGAAAATATATGCCACAGTCTGGTTAATTTTTAAAGAAAAAA
AATAATATTCCAGCAGAAGAATGGATCGCTGGATCAAGTTTTTTTTCTGCCCAATTAAAAGTTG
AAATGGTGGTCCAAAATGATTTCTTATTCGGAAAATTGAATATTTTAAAATAATATATATCGTA
CTGACACGTGAGAATAGCGAAAAGGACGAGCTCACATGAGCCTAACCAGATGGTGCATGGTCCC
GGTCCAGCTCTCCCTTCCCGTCTTTGCACGGCTCCAATTCCTCTCCCAGCTTTATCTCTTCCAT
CTCGGTTCCCTTTCATCTCTTCTCCCCAGCTGTAATACGAGAGGAATACCAGTGCAGGTACTCG
CGCTTCGGCGTCTCTGTCCGCCGCTCCTCCTCCTCACTCCTTCACCAGATCTGTTATAAGCTGA
AGCCTCTCAAACCCTAATCTCGAATGTCCCCAGGGGTATGAGCCCATCTGCAGCCTTTCCATCC
CAGAGATCGATGGGAAGCCATCTAATCCTGTAGTTCTGCCTGCTATAGCACTGAGCAGCGGGAG
AGCAGGCCATGCACCGATCCACCCCTTCGGCTGTATCCTCCTCCTCTTCTGATCTCCTCTTCTC
CCCCCTCCCTCTCGTTGTGCAAGCAGTTCAGTGGGATGCCCGCATCTCTCTCTCTTTCCCCCAT
ATTCTCCCCTCCGCCCCCGCTTTCCGTTTCTTTCTCATCTTACAGGTGTAGAGAGAGAGAGAGA
GAGAGAGAGAGAGAGAGAGCTGTGAGTTAACACAGTAAAAGAAGGCGTAGGATTTGCACAGTCG
TCGTCTGTCGTCTGAGA
-Exemplary Epipremnum aureum salicyclic acid stress responsive
promoter (rrEaPR11)
SEQ ID NO: 28
GGAATTCCCACAGAATCAGATTCGGGTACAAATGCGCCAGGAGGAATACACGCCGCCCAAGGTT
CCCAAACTACATTATTAATACAAGCCTTAATTAGATCAAGTGATCCCGTCAGTGATAAAAATAA
TAAACAAATAATATGTTAGGTTTTTTTATTTTTTTATTTTTATAAAAAGAATATTGCATTAAAC
CTGTAGTTAATTTATTTATATATAAGCTTTAATGCAACAGAGAGATTTGTTGCTAAAATTTTGT
AAGGAGCTTAGATTATTATGCCCCTCTTTTTTCATAGGGTGAGAGGGGTCCTCCTTGTAGTAGG
TTTCTAGAATTCTAAATAGTCACTTAATCAAGTAAATTATAGTTCAAATAAGTGAAATGGATGT
TTAATTAGGCAAAAATCAGATCTGTAGGACAGAAATTTCTTAATTAGGGACATAATTAATTACG
ATCTTGGCTTTCATAGAACATTATAATATAAATATTTAACTGGGAACCAAAAAAATCTACAAAG
GTGTACTTTACACAGACAAATTTCACAATGTTTTTTCAGAATATATAAGATTTTTCTTAGAGAT
ATAGTAAAGCTCACTTAATAAAAGAGATCACGAGATAAGATCTAGTTGATGATAATAATTATTA
TAATACTTTATTTAACAAAAATTAAAATAATTTTAATTATTATGATAATTATAAAAATATTTAT
AATAACATCTTTCATAAATTAACTCTAAGTTAATTTACACGGTTGTGGTTATGATTATTTAAAA
ATTAAACAAAGATTAACAAATTTATAATTATAATTAATGAAGTTGTAAAATTTAATTAGAATAA
TCTCAACTACAGTATCAAACAGTCGACGTTGTTGGTGGACGTTCCCAGTAGAGAGAAAGAGAGG
GAGAGAGAGAGAGGGAGGTGGGCGGGGGAAGAGAGAGAAAGCGGAACCCGGACAAACAACTACA
AAGCTCC
-Exemplary Arabidopsis thaliana quick response stress responsive
promoter (rrAtZat12)
SEQ ID NO: 29
AAGGTATAACGAAGATTTGTTCCGCGTGGAAAAGGCATTAAAAGTGCCACGTCACTCTCTCTTT
TTATTTTATGATTTTCGTATCTCTTCTTCTACTTGCTTCCCACGTTTCCATCAAGTTTCCGTAC
ATATCTTCTTGTTATCTGATCCACGCGATCTTTCAACGCGTACTTTTCACGTATTTGTGTTGTC
ATGCCTTTGCTGGGATTGTGTTAGATGCTCATTGCTGACGGTAGTTTTTAGAGAACATTCTAGA
AAGAAACTATTTTTCTAACAAAACCACGAACTTTGTTTTCTAGTTATTCCACTTTCTAGAATAC
ACCTGACCAAATTAGAATTCTAGAAATGAATTTTAAATAAACCAAAACACCTAAACGAAAAGCA
AACCATAGGTTTTTGGTTTTAACATATTTCAAATTCATAAAAGTGAAACCAACCTACACCATAT
TAACCAATATTTATTAGAGTTTTTATATGTTTTATGATATTGTTCAAAACTTCAAAAGAGATTT
ATTCATATAACATACCTATACCATACCAATGAATATTAAAATTATGAATTAGTATCCTTATATT
ATATGAAGTCAATCAAAAAACTTAGAAGCATTTCAAACGGAATCAAACCATTCATATATGAAGT
ATTATTATTATATCTAGAAGGTGTTGATTTTAAACTATTCCGTATAATATATCTAGAAGACGGC
TCCGCGCGTGGGGAATGCATCAAACTCAGAGAGTTTAATAGCTTTTTTTGGTTGACGTCAACTA
CTCAAAAGAGTTTAGTTTTTGATGTGTATATATCCAAATAAAATATCTTTAAAAAGAAAATAAT
AATAATAAATGGTTTCGAGAAAACACGAGGAAGATTCTCATCCAACCGAAACGACTCTTTCGTT
TTTAGTAGTCTCTTAAGCTACGCGGTGTCGCAAATCGTGACCACATAACCCGTTT
-Exemplary Epipremnum aureum auxin signaling responsive promoter
(rrEaPin12)
SEQ ID NO: 30
GCTACTTCTTTCAGCCACGCACTGCGCTTCAAAACTTCCACGGTACCATAGTCGAGTTTGACGA
GAAAATGTCGAACTTGTGGAGAGGAAGAGAAAGTGATCCCATGAGAATTCAGAATAAATCCAAG
TAGCAGATGAACAGTACTCGTATTGATGCGCTACGTAACGTATAATACCTGGCGAAAACCATAA
AACCCAAGAGAGCGAATCTTAAGAAGTACTGTTGTTTTTTTTTCTGGGGACACGGTGAGAAGAG
AAGCCTAGCGTTCTCCCCCAAACAGAGTTCTCTCTCCTCCCTCCCCTCCTGTCTAAGTTCTAAA
AAGGTGGCGTGGTCGGGCACATTGCTTCGTCTCTTGCTTCCCGTTCCTGAACCCATTTAAAGCA
GGTGTTGCTTTGTTGTCTGCCTACAGAGCTCCACAAAATAGTAAGCAGATACACAACAACACGT
ACGCCATCGCCATAACTCTCCTTCGCCTCTCCCAGTTGCTGGTTACATCTGTTCTACTACGAGC
ACCTGTCCCCCATTTTCTTTCCCTCCTCTCTGCTTTTTCCCTGTTTCGCGCTCTGTCACCGCTT
CTCCCTTCTCTTTCCCCCTCTGCACTGATGGTTAACGTGCTTAAAATCACTTCAGTIGTCCTCT
TCTAATAAGCAGGGTTCTTCATTGAGAAGAATCTCCACAGGTAAGCAAACATCACCTCGTTAGG
CTTCTCATTCCACTTCTTCACAAAGGGTCCACCGCAAACCCAGATAGCAAGCCCTGCTTCGTCG
TTTGCCCCTGTTCCATTTCCATTTCCACCCGGGGTCACTCTCAGTCATGGTTTCCCGGGGGAAG
CAGTGAGCTGCTTTGTTCTTACTGAAGCCAGGCACACAGGGCCTTCCACCACCGCCACCGTTCT
CCCTCGTTCCCTGCATCAGAAGAGCCACGTGGTGTTCTTGCAGGAT

[0191] The term “tissue-specific” promoter refers to a promoter that is active only in certain specific cell types and/or tissues (e.g., transcription of a specific gene occurs only within cells expressing transcription regulatory and/or control proteins that bind to the tissue-specific promoter). In some embodiments, regulatory and/or control sequences impart tissue-specific gene expression capabilities. In some cases, tissue-specific regulatory and/or control sequences bind tissue-specific transcription factors that induce transcription in a tissue-specific manner. In some embodiments, tissue specific promoters may comprise leaf specific promoters, petiole specific promoters, and/or stem specific promoters.

[0192] In certain embodiments, a vasculature specific promoter may comprise but is not limited to: a Rice tungro bacilliform virus promoter, an Agrobacterium rhizogenes promoter, an Oryza sativa sucrose synthase I (RSs1) gene promoter, an Arabidopsis thaliana sucrose-H+ symporter gene promoter, an Arabidopsis thaliana 5-methylthioadenosine nucleosidase 1 gene promoter, a Cucumis melo galactinol synthase gene promoter, or a combination of any characteristic portion of any characteristic portion of any one or more of these promoters.

Exemplary Rice tungro bacilliform virus promoter (RTBV)
SEQ ID NO: 31
AGTAGTAATATTTAATGAGCTTGAAGGAGGATATCAACTCTCTCCAAGGTTTATTGGACACCTT
TATGCTCATGGTTTTATTAAACAAATAAACTTCACAACCAAGGTTCCTGAAGGGCTACCGCCAA
TCATAGCGGAAAAACTTCAAGACTATAAGTTCCCTGGATCAAATACCGTCTTAATAGAACGAGA
GATTCCTCGCTGGAACTTCAATGAAATGAAAAGAGAAACACAGATGAGGACCAACTTATATATC
TTCAAGAATTATCGCTGTTTCTATGGCTATTCACCATTAAGGCCATACGAACCTATAACTCCTG
AAGAATTTGGGTTTGATTACTACAGTTGGGAAAATATGGTTGATGAAGATGAAGGAGAAGTIGT
ATACATCTCCAAGTATACTAAGATTATCAAAGTCACTAAAGAGCATGCATGGGCTTGGCCAGAA
CATGATGGAGACACAATGTCCTGCACCACATCAATAGAAGATGAATGGATCCATCGTATGGACA
ATGCTTAAAGAAGCTTTATCAAAAGCAACTTTAAGTACGAATCAATAAAGAAGGACCAGAAGAT
ATAAAGCGGGAACATCTTCACATGCTACCACATGGCTAGCATCTTTACTTTAGCATCTCTATTA
TTGTAAGAGTGTATAATGACCAGTGTGCCCCTGGACTCCAGTATATAAGGAGCACCAGAGTAGT
GTAATAGATCATCGATCAAGCAAGCGAGAGCTCAAACTTCTAAGAGAGCAA
Exemplary Agrobacterium rhizogenes promoter (RolC)
SEQ ID NO: 32
AAAGTTGGCCCGCTATTGGATTTCGCGAAAGCGGCATTGGCAAACGTGAAGATTGCTGCATTCA
AGATACTTTTTCTATTTTCTGGTTAAGATGTAAAGTATTGCCACAATCATATTAATTACTAACA
TTGTATATGTAATATAGTGCGGAGATTATCTATGCCAAAATGATGTATTAATAATAGCAATAAT
AATATGTGTTAATCTTTTTCAATCGGGAATACGTTTAAGCGATTATCGTGTTGAATAAATTATT
CCAAAAGGAAATACATGGTTTTGGAGAACCTGCTATAGATATATGCCAAATTTACACTAGTTTA
GTGGGTGCAAAACTATTATCTCTGTTTCTGAGTTTAATAAAAAATAAATAAGCAGGGCGAATAG
CAGTTAGCCTAAGAAGGAATGGTGGCCATGTACGTGCTTTTAAGAGACGCTATAATAAATTGCC
AGCTGTGTTGCTTTGGTGCCGACAGGCCTAACGTGGGGTTTAGCTTGACAAAGTAGCGCCTTTC
CGCAGCATAAATAAAGGTAGGCGGGTGCGTCCCATTATTAAAGGAAAAAGCAAAAGCTGAGATT
CCATAGACCACAAACCACCATTATTGGAGGACAGAACCTATTCCCTCACGTGGGTCGCTAGCTT
TAAACCTAATAAGTAAAAACAATTAAAAGCAGGCAGGTGTCCCTTCTATATTCGCACAACGAGG
CGACGTGGAGCATCGACAGCCGCATCCATTAATTAATAAATTTGTGGACCTATACCTAACTCAA
ATATTTTTATTATTTGCTCCAATACGCTAAGAGCTCTGGATTATAAATAGTTTGAATGCTTCGA
GTTATGGGTACAAGCAACCTGTTTCCTACTTTGTTAAC
Exemplary Oryza sativa sucrose synthase I gene promoter (RSs1)
SEQ ID NO: 33
CAATCCACCAAATCAAACCGTGAGATTTTTGCAGAGGCAAAACAAGAAAAGCATCTGCTTTATT
TCCCTCTTGCTTTCTTTTCATCCCCAACCAGTCCTTTTTTCTTCTGTTTATTTGTAGAAGTCTA
CCACCTGCAGTCTATTATTCTACAGAGAAAAAGATTGAACCTTTTTTTCTCCAAAGCTGACAAT
GGTGCCGGCATATGCTAATAGGATACTCCCTTCGTCTAGTCCCTTCGTCTAGGAAAAAACCAAC
CCACTACAATTTTGAATATATATTTATTCAGATTTGTTATGCTTCCTACTCCTTCTCAGTTATG
GTGAGATATTTCATAGTATAATAAATTTGGACATATATTTGTCCAAATTCATCGCATTATGAAA
TGTCTCGTTCGATCTAGGTTGTTATATTATGAGACGGAGAGAGTAGATTCGGTTATTTTTGGAC
AGAGAAAGTACTCGCCTGTGCTAGTGACATGATTAGTGACACCATCAGATTAAAAAAAACATAT
GTTTTGATTAAAAAAATGGGGAATTTGGGGGGAGCAATAATTTGGGGTTATCCATTGCTGTTTC
ATCATGTCAGCTGAAAGGCCCTACCACTAAACCAATATCTGTACTATTCTACCACCTATCAGAA
TTCAGAGCACTGGGGTTTTGCAACTATTTATTGGTCCTTCTGGATCTCGGAGAAACCCTCCATT
CGTTTGCTCGTCTCTGACCACCATTGGGTATGTTGCTTCCATTGCCAAACTGTTCCCTTTTACC
CATAGGCTGATTGATCTTGGCTGTGTGATTTTTTGCTTGGGTTTTTGAGCTGATTCAGCGGCGC
TTGCAGCCTCTTGATCGTGGTCTTGGCTCGCCCATTTCTTGCGATTCTTTGGTGGGTCGTCAGC
TGAATCTTGCAGGAGTTTTTGCTGACATGTTCTTGGGTTTACTGCTTTCGGTAAATCTGAACCA
AGAGGGGGGTTTCTGCTGCAGTTTAGTGGGTTTACTATGAGCGGATTCGGGGTTTCGAGGAAAA
CCGGCAAAAAACCTCAAATCCTCGACCTTTAGTTTTGCTGCCACGTTGCTCCGCCCCATTGCAG
AGTTCTTTTTGCCCCCAAATTTTTTTTTACTTGGTGCAGTAAGAATCGCGCCTCAGTGATTTTC
TCGACTCGTAGTCCGTTGATACTGTGTCTTGCTTATCACTTGTTCTGCTTAATCTTTTTTGCTT
CCTGAGGAATGTCTTGGTGCCTGTCGGTGGATGGCGAACCAAAAATGAAGGGTTTTTTTTTTTG
AACTGAGAAAAATCTTTGGGTTTTTGGTTGGATTCTTTCATGGAGTCGCGACCTTCCGTATTCT
TCTCTTTGATCTCCCCGCTTGCGGATTCATAATATCCGGAACTTCATGTTGGCTCTGCTTAATC
TGTAGCCAAATCTTCATATCTCCAGGGATCTTTCGCTCTGTCCTATCGGATTTAGGAATTAGGA
TCTAACTGGTGCTAATACTAAAGGGTAATTTGGAACCATGCCATTATAATTTTGCAAAGTTTGA
GATATGCCATCGGTATCTCAATGATACTTACTAAAACCCAACAAATCCATTTGATAAAGCTGGT
TCTTTTATCCCTTTGAAAACATTGTCAGAGTATATTGGTTCAGGTTGATTTATTTTGAATCAGT
ACTCGCACTCTGCTTCGTAAACCATAGATGCTTTCAGTTGTGTAGATGAAACAGCTGTTTTTAG
TTATGTTTTGATCTTCCAATGCTTTTGTGTGATGTTATTAGTGTTGATTTAGCATGGCTTTCCT
GTTCAGAGATAGTCTTGCAATGCTTAGTGATGGCTGTTGACTAATTATTCTTGTGCAAGTGAGT
GGTTTTGGTACGTGTTGCTAAGTGTAACCTTTCTTTGCAGTTCCTGAAATTGAGTCATG
Exemplary Arabidopsis thaliana sucrose-H+ symporter gene promoter
(AtSUC2)
SEQ ID NO: 34
AGCTTGCAAAATAGCACACCATTTATGTTTATATTTTCAAATTATTTATTACATTTCAATATTT
CATAAGTGTGATTTTTTTTTTTTTTGTCAATTTCATAAGTGTGATTTGTCATTTGTATTAAACA
ATTGTATCGCGCAGTACAAATAAACAGTGGGAGAGGTGAAAATGCAGTTATAAAACTGTCCAAT
AATTTACTAACACATTTAAATATCTAAAAAGAGTGTTTCAAAAAAAATTCTTTTGAAATAAGAA
AAGTGATAGATATTTTTACGCTTTCGTCTGAAAATAAAACAATAATAGTTTATTAGAAAAATGT
TATCACCGAAAATTATTCTAGTGCCACTTGCTCGGATCGAAATTCGAAAGTTATATTCTTTCTC
TTTACCTAATATAAAAATCACAAGAAAAATCAATCCGAATATATCTATCAACATAGTATATGCC
CTTACATATTGTTTCTGACTTTTCTCTATCCGAATTTCTCGCTTCATGGTTTTTTTTTAACATA
TTCTCATTTAATTTTCATTACTATTATATAACTAAAAGATGGAAATAAAATAAAGTGTCTTTGA
GAATCGAACGTCCATATCAGTAAGATAGTTTGTGTGAAGGTAAAATCTAAAAGATTTAAGTTCC
AAAAACAGAAAATAATATATTACGCTAGAAAAGAAGAAAATAATTAAATACAAAACAGAAAAAA
ATAATATACGACAGACACGTGTCACGAAGATACCCTACGCTATAGACACAGCTCTGTTTTCTCT
TTTCTATGCCTCAAGGCTCTCTTAACTTCACTGTCTCCTCTTCGGATAATCCTATCCTTCTCTT
CCTATAAATACCTCTCCACTCTTCCTCTTCCTCCACCACTACAACCACCGCAACAACCACCAAA
AACCCTCTCAAAGAAATTTCTTTTTTTTCTTACTTTCTTGGTTTGTCAAAG
Exemplary Arabidopsis thaliana 5-methylthioadenosine nucleosidase 1
gene promoter (AtMTN1)
SEQ ID NO: 35
CAGCGAAAACACCTTTGATGGGAGCGGTATCAGGAGGCTCTTGTCCAATAAATTCGAATTCGAT
AAGGTAAACTACCATACATATATATGTTATCTAGCTTTTATGCTAAAGGAAAACTTTTTAAATG
ATGGTAACGAGTGATGATGATCCGGAACGGTTTGGTCGCAGGCACTAAACGTTGCCATGGAGAC
GATTCCAAAAGACCGTCAGGGTAAGGTGTCTAAAGGATATCTACGAGCTGTGCTTGACACTGTT
GCACCATCGGCCACTTTACCACCAATAGGCGCTGTGTCCCAGGTAAATAATGCCCCGTCTAAAT
TATTTTGTCTTTTAAATTGTTTATTTTGCCTTTGAATTTACATGTTACAATTATTTGTTAAACA
AATGAAACCAGAATTAGTGTTTTAATCAAAAATTATTAGTGAATTTTTATTTTTATTTTTTGAA
CGGCATTGATTAGTTAAGTTTGTTTTTGTTTATAAGATGGATAATATGATAATGGAAGCGTTGA
AGATGGTGAATGGAGATGATGGAAATGTGGTGAAGGAAGAAGAGTTTAAGAAAACAATGGCAGA
GATATTGGGGAGTATAATGTTGCAGCTCGAGGGTAGTCCCATATCGGTTTCCTCTAACTCGGTG
GTTCACGAGCCGCTCACCTCGGCTACCTTTCTGCCGTCAACTTCGACTGATACAGAGGAGCCTT
CAAACTAATCATAGAAGGGAATAAGCAGCACTAGCAGCAACAAATGTTATATGGTTTTGACTTT
TGAGTGTTTACCCCCAAAAGTTTTAGATTAATGAGGAAAACCGTCTTTACTTTCAGATGTATAA
AATTGAAAGTTTGGGGTTTCCTCTTGTTGGTGTGGTGATTCTACTCATGCCTTTTTTTTTTTTT
TCTAATGACCATGGGATGCAATGTTTACTCTGTTTTTTAATTTCGTTAAAATTTGTTTACGTTT
ATGATGCTTGAATGGCTATGATGAAACATTTGAGTTATCTTTAAAAGTGTGAAATAAATATTCT
GAAGTTAATTGAAGAATTTGAAAATTTGATTACAAGAGCTTGGCTAAAACTACAAGGAGACCAG
ATTAGTACAAAAACTTAGCTAAATTTAATTAATTACGGTCATTAGCACAAAAAAATAATTTGTT
TTTATTATATTATTATTGGTAAGTGGAAACACAAAAGAGGACCAAAAGGTCCAAAAACGAATAA
ACTGTATCTCTCATTCGCCGGAGTTTCCAGCCGTTTCTTTCCGATTCTCGGATTTTTCCTGGGA
ATCAAACGCATCGCCGAGAATCGGAAGAGAGGGATAAGGTT
Exemplary Cucumis melo galactinol synthase gene promoter (CmGAS1)
SEQ ID NO: 36
TCTAGATGACTTGGATTAATTCTCTAACAAGAATTTAGTTTAATTGACATTTGTATGTTTGAGG
ACTAAGAGGACTTTAGTTTTAATTTCTAATCTAATTTGTACTAGAAAAGAAAAAAAAAGAGTCG
GATTAATTCTCTACCATTGAGTGGAGGATACTTGGATGCAGTTCAAGTTCTCATCTCTCCAATT
TGTCACGTGACAGCGGATGATTAAGCATATGAGTAGGCTGCAAAAGATTATAGACGTAGAAGAT
GATACCCAATACAAAGGCGTAACTTTTCCCGGATGACTTTTATACTCTTTACAAAATTGGAAGT
CCTATTCTATCTACATCTTAATTTCCAGTTGTTATAATGAAGAATAGTCTGAAAATGATATCAA
TTTTTTCTTTCTCAATACCATTCAATTACGTTAAGATTATTAGGAGCTGCCATTATTATTATTA
TTATTGTTGTTGTTATTATTATTATTATGCAACCAAGTTTGATTTGAAATTGTTTGCCAAATTT
TACTCCAATTTGATGTTGTTTAATTACTTTAGATGGTATAATAAGAATGAAGTTGAATTTAAAG
AAAAGAAACAAAGCTTGAAAGAATGGAATACTTAGGTGTAGAAGAAGACAACGTATTTATAACG
TCGTATAGTGTAAATAAAAATGCACACATTTGGATGCCCTTTATGCTTCTTAGAGGTCAGACTT
TCCCACAAAGGCTAAGGTGATTCAATCGTGTGGGACATCTTGTTCTCCCATTTGATTCTCGTTT
TCATTAGACCAAAATTAACAAAAAAATAGTAATAATTCTATTCTTTTTAAAGTTTGTGATATTA
CGGTTTATCCTTTGTTAAAAAAGTTTATCTTTGAATGTAAGAATTTGATAGAATGTTGAATGAA
AATTAAGATTTTGAAAAGTTTTGCTGAATTTCAAATAATATAACTCTCTAACTTTGGTTTAGGA
AAATTAAGTGATGACAATTATCTCTATTAGAATTAGTATTATAAGTGATATTTGAGTTATGCAC
TTGACTTGGTCGTGTTGGTAAATTCTTTGGATACAGAACAAAAGAAGTTGCATGCCAAGAAAGA
TTTCTAATAGATATGGTGAGATATGTGGCCGTTGGCTCTATTGGATTGGTGGTATGTTCCAGAG
AAGAGGAGTGCGTATGGATACGACCTAGGTGGATAAATGATTATATGAGGAGATGGTAATTTTA
TGAAATGTGTTAGAGCTTTGATGTTAATATATATTTTTTAAGTGTGTTTTGTGATCGATGGTAT
TAGATGAGTTCCTTATTAAACATGTTTTCTTGGTTTTTCTCGAGGTGGGGTTCTCAACACTTGG
TAACATGCATCATGTCCACGAGATGTTCTTCATCTTATCTCTTGTAATATTATATATGATATCT
CACACAATACAGGTTCGTCTGAAAAATCTTTCTTTATTTGAAATTTTTTAGGTATTTATTCTTG
AGGATTTTTTTATTCTTAAGTAAAGTGTTCATGATTTGAAGTTAGAAATATAGGAGTTATTTTT
AAGAGAGAGTCTCACACTCAAAGGGAGTCTAAATATCTTTTTTACTAATTTAGGTTGTGTAATA
ACCTTGTATTTATCGATAAGTATCACGATGTAATCATTTAACTATCTATTAACGAAAATCTTTT
TTAGGACACGTTGCCTCCTAGATAGATGCAAGTTGTATTGCAAAACTTGTACTCTGTTTTTTAG
TTTTTTACATGTTTTACTTTAGAACTAAACCTAAGTTATGTTATGTGTCAAATAAACTTCTTTA
AAATAATATTAAAACTTCTCAAAATAATAGGAAAAAAAAGAAAAATTTCAAATTTAATATATAT
ATATATATATTGTAATATTAGCTTTCATTATCATTGAATTAAAAATTGCATATACAAGAATCGA
ATAATGTGGAGAAAGTAGTTTTCCTTTTTCAACTTTGTGTAGAGGCTAAGTCTCTAAAATATTG
GCTTCGACTTTGTACTTTTGGATCCGCCACCACAATCAGACAAACTTCCATTTGATCATTACCT
TTATCGAATCAAATTCTTTCCCTTCCAATCTGTCACAATTTTGAACATACCATCCACCTTCTGA
TTTTTTGATTCTAAATAAACCTTATTAGCAGAGATTTTTAAAATTAGTATTAAATTATACCAAA
TACCCTAATGAACTTTTTCAATAGTTTTTCTATTTTATTTTTTTTTTCTTTTGTGTGTATGAGT
TTTTTCACCACCATTAGAAAACACATTTGAAATATACAGAACCAAATTGTTTAATTTGAATTGG
TTTTCCATACCATTTTTACAAAATACATAGTATAACCAAAAGAACTATAGTTTTAAGTAGTGTA
TAATAGTTTAATTTTAAAGACAAAGAACTAAACAATAATCATTATCAAAAACACTACCTTAAAA
CAGAATTGAAATCAAATCCATTTGTTTAGGAATATATATATATATATATATATATATAATATAG
TATCATAATATATAAAAAAAATGTCAAAATCTGAGATTCTTTGATCCTCCCTAAATTGTCCATT
TTTGTCTTGCCTACAAACTTGCAAAAAAGAAAAAAAAAAAGGTTCATAGATAGAAATGACCCAT
AATTGAATCATAAAGCAATAAGGATATACAAAATTATTATATCCAAGAGGGATGAGAGATAATC
TTAAAGGTGCAAAAGAATCTTCTTATTGATGGAAGAAGAGAATACAAACTCTTCCAACTTTTGA
TCAAAATGCCCATAATGCCCTCCATCTCACCTTAAAGATAGGATATTCCAAGTCATATTCATCC
CACCAATACCAATATCTAAAATAATAAGTAACAAATAATTACAATTACAAATATAAAGTGCATA
GAAATTAAACTTAGGGGTATCTATAAACTTAAAACAATGTTCCCCAAGGCTCTATAAATAGCCT
CCTTCCCATCCCTTCACAACTCAAGCTTGAAGGACTAAAACAAGAACTTGTAAGCTTGCCCTTC
TTATTAAGTCCTTCTTGCCTCCCTTCCTTCGGAGAGAAAAAACTTTTGTTGTTTCAAAAGCACC
AAAGTCAATATGTCTCCTGCA

[0193] In certain embodiments, a leaf specific promoter may comprise but is not limited to: an Epipremnum aureum metallothionein promoter, an Epipremnum aureum ribulose bisphosphate carboxylase/oxygenase activase 2 promoter, certain Epipremnum aureum hypothetical protein promoters (e.g., hypothetical protein AQUCO_03600155v1), an Epipremnum aureum carbonic anhydrase 2-like isoform X1 promoter, or a combination of any characteristic portion of any one or more of these promoters.

Exemplary Epipremnum aureum (rrEaLeaf1 or P18)
SEQ ID NO: 37
AGCTACGCTCTTTGTCCACAATGTGACAAGGAATGAGAACGAGTCAGCAGTAGATCATCTGGCG
CGCTCTCTGATTGGTGCGTTCACCTCCCGTACCCATGGGCACGCACCCGAGCAGGACCGGGCAC
CCCCAGTGAGCCCCTCACATCCATTTCCTGCCCTGTCGTGGAGTGCAGTCTCTTCGACGTCCCC
GCCTTATAATTAATTACCTGTGCGTATTCGTCCGCACGCTACTGTGCAACGATTCCACCATAGG
ATATATGAGGGGCTTATGCTTATCATATGGAGTTCAAATTTTCTTTTTTATTTTTTTTTATTTT
TTAATTTTTTTATTCATAGTTCTAGTTGGATTTTTGATATTAGAGCAGGTCTTTTTACAAAGAT
GCTATTTTTGTGAATTAAATTTACGAATTTGTCATCTTTATTTTAATATAATCATAAAAATATG
TATGATAATATAACATAAATTCATGTGCAACAATGACATATTTGTCAAAAAAAAATTATTAAAA
TAATGATTATGGAAGAGGAGAAGATATAGAATTAAAAAATCAGATAGGACAAGAGAAGAAGATA
AATCAGAACTGGCCATCCTTTGAATTCAAGTTTGTTTTTAGTTTATTTAATTTTTAATTAATTT
TATGTGGTCCGACCACAGAAAAAGAACAACCCTAAATTTAGCCTTCAATACATTACTGTGGTGC
GAGGAAGCTGCGTCCCCATATGCCCATGGCGTGTGGAGCTGGTACGACTGCTTCTGTCTCGACG
TGCGTTCCCCCCGGAAGAAAAAGAGAAGGAAGTGACGTGAGAGGTCCAGAGGCAGCCGACCTTC
TCCTCCATTATCGGGAGAGATTCCTCTCGGGACTCCCACTCGCAAGAGCCCTCTC
Exemplary Epipremnum aureum ribulose bisphosphate
carboxylase/oxygenase activase 2 promoter (rrEaLeaf2)
SEQ ID NO: 38
TTGTTCAGAAAGGAACCCCCTAGTTTGTAATTGGAGGTCATAAGAGGTACTTTCAGTCCTCAAA
ATTTATCATTTCTTAATGAAATTTTTAATTTTAAAAGATTTATTCTTTTTAATAATTTTTAGGT
TGAGATCAAGTAAATTTAGAAGATGATTTTGACAACGATTTTTTTGAAGTAGATAATCAAAATT
AGGAGTTTTAAGAATGATAATAATTATTATTTTAATAAAAATTTAAACTCACCTTCTATAAACA
GATGTCTCTCATTGTACCAAAAATTTTAGATTTACATATTATTATAAAAATATCTTTTCATTTT
ATAATTTATAAAAATATTTTTTAAAATTAATTTATTTCAAAATCTATCATGAGCTGTCTTAAGA
TAAGAGTTGCATAATTATAATTATTTTTTAATTGTAATAAATAAATATCCATACTACCCTCATG
TTAAAAAAATATATATATATATATATAAAATCATCCCTCCCCCTCTCTCTCTCCTCGTCTCTTA
TGTTTCTGAATCACATTTTTTTAAAAATATTAATTAAAAATAAAATATTTTTAAATGTTTTAAG
TATAATAATATCTAATTAAATTTTTTGAAAACATTTTTTAAATTATTTTATAAATGATAAAAGA
GATCTTTTTGTAGTGCCAGCTCGTAACAAGGTATATTTACGAATAACCCTTCCTTTTATTGCAG
ACACCTCGGCTGAGAGTACGCAGTAGATGACGGGTCCCACTTTTTTTCCCCACGCTCCAAATAG
CTCCAACGTCGTCAGGACACGACTTATCTGAACAGAAGTTATCCGCCCTGATTGCGCCACGTGT
TCCGGCCCAATCCCCACTGTGTGGCCACAGGACCCTCCGCTCTCCCCCTCTCCTCCCCTCCCCT
CCGCCAGCCAGAGGGAAAAGGAACAGAACAGGGCGATCTCCAGAACCTCCGCAGGCCGCTTTAT
ATATAGTTCGCCCTACCCCACCGCCTCCGGCCAACGCTGCTACGAGGAGCTGAGCTTTTGGTGG
AAGCGGCGATCCCCCCCTTCCGCCTTCTAGGTCTTCCGGGTCCC
Exemplary Epipremnum aureum hypothetical protein
AQUCO_03600155v1 promoter (rrEaLeaf3)
SEQ ID NO: 39
GTGCGATCCCTCTTTCCCTCCACAAATTAATAAAGCCTGATTTGGGTTTTGATCACAGAAGATC
TGTGTTGCTTGATCGATGTGTTGATAAAGACTAAAAAGAAAAAGAAATCCTCGATCTATTAATT
TAATTTTTAAACAATAAATTTACCTATTCTCTTTCCATTCCCTTCAGTCTTCATGGTTTCATTA
ATGGCGTTATATGCCCTTGTGAGAGATTTAATTGCGTAACTATCTCTTTTAGATTTGCATCTTC
ACGCGCATGTCATCCTCATGCGGCAATGTACCTATCTATCCCTCCCGTGAGGGTATATATACGA
TTAAAAGTATCATCAAGATATTTTTAAAATTTACAGCTATACACCTCTTAATGATATAATGGCA
CACACGTTTGAAGGAAGAGAGTGTATACACACGAATGTAAATTTAGAAAGGATATTCATGCAAG
TGGGACTCTAATAGACATGTATGGAAAATGTCTGTTTTTTTTTAACCCATATCCAATTCACTCG
AGTATAAATGAAGGTGATAATTATTTGCATGTGCTTGGCCTTTTTAATGTAAATTTGGTTTATA
CCAGTGGCATGTATTCAAACTTCCTTTATTTTTCGGTCTGCATCCATCTCCCTCTCTCTGGTGT
CTTCTTCTTCACGCAGCCAGAGGTTAAGGGAGTTGCGTGTGCAAGTGCAACTGGGCAACAGTGC
AAGCATAGCCAAAGGGAAGAAGAAAGAAGAGGAATTGACACGAGAGGTGGAGGGGTAGCCCCCC
TCCTTCCCCACCATAATTGAGATTCCTTTGGAAGCTTCCTCCATGGAGGCGTGTGCCCATCACA
CACAGGGGCCCTCCCCTCCCCTCCTCTCCTTGTGCCGTGTGCGTCCCTCTGCCATCCCCCCCTG
GGGCCTATAAATATCGTCGCAGGGTGGAAGCCCCTCCACCATAGCTGGAGCTGACCCCTGAGCT
GAGAGATATATAGCAGAAGCTCTCTTTGATCATCTCTAGAGGCTCCCCTCTGC
Exemplary Epipremnum aureum carbonic anhydrase 2-like isoform X1
promoter (rrEaLeaf4)
SEQ ID NO: 40
CGCACGTAGCCTTCGTTACTCATCTTGTTGTTCGTCTAATTTGGAGAGATGGTTTCAAGCATTT
GACAATCCAAGGAGACAAAGTCATTAGTATTAATGTTTCTCTGTTAATTAATTGTCTCCCTGAT
ATCCTGTCTCAAGTATGTTTATGTGTGTGTGTGTGTGTAAATATAAATATAAAGAACAATATGT
GATAAAGGATAACCATTCTGCATGGTGGATTTGTCTTCATTAATTAATATAGTTCTTTCTTTCC
ATCATTTGATTTCATTTCATACACTAGTACTTTGGTACCATGTTTATTTTTCAAGGTTTATCGA
ACAGGAATTATTCAGAAGATATACCAAAAATCGATTGGATTCATTCTCTATTCAGACTGTTAAT
TGTTAACCATCGATTTAAACATGTCATCTTAAGGGAAATTAAGAAACTAGATTGTGTTTACGTT
TTCCACACTGTTAGACCTTCTATAGTATCTTCATTGTTCTCGAGTCGATTGGTAGTATTGGAAC
GAACTAGCATGCATGTGTGGAACACCCCCTCTTATATACTGCAAAAAATGAAAAAGAAAAGAAA
ATGGACCATCACTTTGATTTTTTAGGGTTTGGTGGCTTCAAGACACGATGCTTGGCTGGGTGCA
ATTAAACTGTGCCATAAAAATGTACTATGCTATTCAATAATCGATTTCATGAGACATGGTACAT
GTCATATTTCATAAATGACGTGGTACATGCCAAATTTCATAAGTTTTCTTGTCTAGAAACTTAA
TAAATTACTATTCGCATAGAAATCCTGAATTTTTACTATTTCTGATTTCCCCCACCCCCAGAAT
TTTAAGGTTGAAGCTATCAGAAAAACAAGAATTATTATATATAATCCATCTGCAATGCATGAGA
TTAGCGATACACCTGCAACGCCATCACCTATTCCATCCAACGATTACATGACACTGTCATCTCC
AAGCCTTCTCTCTCTCTCTCTCTCTCCCTCTCCCTTATTTGAAGCAGAAGCCATGGITGATCCG
GCTTTCGCTTTCCTTATCCTAACCCACCCCCGTCGCAGAGACTATATATCGAGCCCTCCACCCC
TCCTGGGACGGGTGTGAAAGAGAGCA

[0194] In certain embodiments, a petiole specific promoter may comprise but is not limited to: an Epipremnum aureum beta-galactosidase promoter, an Epipremnum aureum vacuolar-processing enzyme promoter, an Epipremnum aureum cathepsin B promoter, an Epipremnum aureum metallothionein-like protein type 2 promoter, or a combination of any characteristic portion of any one or more of these promoters.

Exemplary Epipremnum aureum beta-galactosidase promoter
(rrEaPetiole1)
SEQ ID NO: 41
TTCGATCTCCCCCTCGACTTGAAAAAACTAATAAAAAAATGTAACCTTATATTTTTCCGTAAGT
AAAACGGAAAGTATATTTAATAGAATATAAAAAATCTGTAATTTAATTATTATTCGGATAATAA
GAGAAAGAAGAGGAGGGCAAAATTATGGGAGTTGATGGATGGATGATGCTGCCACGTCAGAACT
CGGACCGGGACGTGGCCGGCCGGGTGGCGCCGGTCCTGCCCGCCCACTCGCTTTCACCCCACGC
CCTTTAAATCCCACCCGGCGCCCCGTTTCCCTCGCCACGGCCATCACCACCAACGGCCTCTCTC
TCTCTCTCTCTCTCTCTCGCGATCTTCACAGCCACTTCTCACTCCATTACGCTCTTGTTTACTC
CTCACTCCCATCTCCTTAAACGCAAGCGACTGCAACCCAAACCACGCTCTTCCATTGGCCTCGT
CCTCCTCTCTCGTATCCCGAAAGCGAGAGAGGACCGGCCAGAGAAAGGGGACAGAAGAAAAAAA
AAAGAGTCGGAGGGAGAAAAAGAGTGGGCCGAGCGAGAGGAGTTGGAGAGAAAATTATACTGAA
GAGCACCCTAAAGCGGGCAAGGAATATTGCTGGGGAGTTGGGAGGAGAGAACAAAACGAGAGAA
GGAAGAAAGAAAGGAAGAGGGAGACGCGCAGTGTTACAAGGAAGATTAGGGGATAAAAAAAGCC
GTTTTCTTCTTCTCTGCTGCTGCGAGGTCGCTGACCGCCTTCCTTAGACTCCTCTGCTGGACGC
ACTACTTCCCATCTTATCTTAGCTTTCTCCAACCTTTAGCTTCTGACACATTAAAGAGGAGGGA
ATATAGAGGAGAAAAAAAAAAGATCGTCGGAAGGAAGAAAGGAAAAAAAAAGATCCAACCAGGT
TTCTGCGGAAG
Exemplary Epipremnum aureum vacuolar-processing enzyme promoter
(rrEaPetiole2)
SEQ ID NO: 42
TGGTTGAAGTGCTAAATTTGGCATTGCCTCAATTTTGTTACTAAGATTTTTGTAATATCAAAAA
TTAATATTATAATTAATTTAACACAAAGTTGAAATAATTCAGATGATCTTGTCAAATTATTAAT
ACTGTTGATGATATTACACTATTTAATAAAAGAACCATATGCCCCATAAAATTAACTCGGCCTT
CACTGAAGAATGATCAAGTGGTCATTATGTAATCATCTGAAACTCAGGGATGATACATACACAT
ACATGTCTAAAACTCCTAGAAACTGTAGTTAATTGCACCCTTTTGCCACTGCATTATTTCATCT
GGTACCAACTGACATGGCATCCCCTGTCCACTTGCTATTGGATCAACACGCCCGACTTCTTACG
TCGCCACGCCGGGGCCCACCTAGATAGGAACTATCTGCTTGATCCCGTCGAATCAGCAGCGTTC
CAAGCCCGCTCCCCCATCGGATAGATATTAACCGTCGGATCAATGGATCCATCGTGGGAACATC
TATCTTCCAATGCCGAACAGCACAACTAACTCCCAACCGCCACCGCTGGCCCACCCACCGATCG
TTGAGCCGGATCAGGATCCTGCGGCCCTCACGTGACCCCCAGAGAACATCGCCTCCTCATAGGC
CGTCGCGTGCGAGGGCTGACGCCCGTCAACACGACCCCCAGGGAAGACGTCACGTCGGCAATTC
CGGAGATTCAAGGCGAGCGCATAGGCCGCGCCAATTAAGCTAAAACCCGAAGAAATCCTTCGAG
CAGAGCAACAGCTCGGCGGGGCCCCACTTTTTCTAACTTTCCCCCGCTCCAGTCTATAAATAGC
GCCCACTTTCCGCCCAGGTTTCCTCGCCATTGACGATTAGAGCACTCGACGGAGGTAAAGCTGC
TTCCCTGGGTGCCCCCCGCACCACCACCAACG
Exemplary Epipremnum aureum cathepsin B promoter (rrEaPetiole3)
SEQ ID NO: 43
CTGAGGAACCCCATTGCAGTTTTACTACGGTCAGATTGGAGGAGAGATCGAGGCGGCACACGTA
ACGGCAAAACGTCACGTTGACGGGGCTCTTATGGTTCCCGTGTTACGTAAACCCCCGGCATTGG
GACCATTGGGACTCACCAAGTCCCGTGTGCGATTGTCTCTCGAGTGGCGTGCCTCATCACTCAA
CACAAGGGCGAGGGGTGCACGGCGCTGTCGTCACCCCTTACGTGAGCACGCGGTATAACGATAA
CGGCATCTACCATCCGACGGGAAGGAACAGCGTCAGATCGTAGCGGGATGGACCGTCACGGCCT
CCTATATATCTGATGAAGCGCCGTCAGATCGGGAGCCCTGGGCCCACAGCATTGGGGTGCAAAC
CAATCAAATGCCACTTCCTCCAATAATGGACACTATGGGTTCCAGCTTCGAAGAAGCGGCAGCT
GGCGCCTCCGTAGCTCTCTCTCTCTCTCTCTCAAACGGCGGCGTCATCTTATCCTATCGCCTTT
TCAGAGCCCGGCTGCGCAAGTAACCGTCCCGTTGATTTAGATCTGGATTTCATTTATTTGCTAC
GTTGAAATCAGGGTCCAATCGCACTGCCATCACCCCCAAACGTCCGGATTCCATTTATGTTATA
CGCTGAATCGAGGTTCAGCCGCGTTGCCATCACCGTCGAAATAGGTACCGCCGCCGCCAAGCTT
CCATATCATCTTCCCCCTCATATCAAATTCTGACCCCTCTCTCTCTCGCCCCCCTTCCTTCCTG
GTCTTGCTACTCCGCTCCGTCCCTCTCCCCGTTTCACCTCTCCACCTGCTGTCTGTAAATGGTG
GGGGTGCTGTTTCGAGCTGAAGGGTGAGGGTGTGGGGGTGCTGTTTGGAGCGGAACGGAGAGGA
TAGGGCACAGATATAGCTAGGGGGAGAGAGAGAGAGAGAACAACGGGG
Exemplary Epipremnum aureum metallothionein-like protein type 2
promoter (rrEaPetiole4)
SEQ ID NO: 44
GTACGCAGGCTGAAAGAAGCCTCTTTATTCAATTGAGAAGTGATAGTAACTATTATCCAATAGA
GTAGGGAGAAGACGTATACATCCTTTTCTATGGCATCGTTTACTTTGTCTGTCCACCATGAATG
TACTCTATAATAAGTAGTAATCAATGAAATGATACCTTAAAAAATTAGATGTTTGTAATGGCCC
CCCCTTAGTAATCTTCCTAGTGACGGATGCACTTTAAAATATTGGAGAAAAAAATGATGGTTGC
AGTACAACAATATCATATTAGGTAAGAAAAATACAAGAGTGTGTGGAGACTTGGTCTACTTTTG
ATGTAAAAAAACTGTAAATATTGATGGGTTGAGTTAGTATTATAAAAAAAGAATAAGTTTGAGT
AATTCCTTTTCACATAGAAACCTTTTAAGTCCCTTTCATATATCAAGCAGCAGACAAGAATTTA
AAATTTTGAGGTCTTCACATGTTGGATGCAGTGCTCTTCTAATTAGCTGTGGCGGCAGGAGTTC
ATGAAAATTAAGAAAAAAATGATATGAAAAATGACAAGATTCCCTACTTCATCCGACAATGCAT
ATGGTCTGGGGCAAATTAGAATACCACACTTCTCTCGTCATTCTGTCATTACTCCTTTTTTTAT
TTTAAAAAACTCACCTCATCATTTATAGTACCGCATGTTAACTCAGGTGTTATTTGATAACGTT
ATCAGCGTTGATTTTATCTTTTAATTTTTATAAAATTTTAAAAAATATATAAATATTACTATCA
AATGAATAAATACTAAATCAGATTTAAAAAATAATTTATAATTATTAGATTAAAAATCACTTTA
ATTCATTTTAATAAAATCTAAGACAATCATAATATTGATATGATTTAAAATTTAATAAGAATAA
CATAACGATAATATTATCAAATGAAGTGTTTCAAAGATCACAAGTTATCCCATGTTCGCAAGAA
GGGTAATATAACTGTTGACGGCACAACTATTGTAGGAGTTTTAAATAAAGATCTATATAACTTG
ACATGACGTGAGGTAGCAGAGACCATCAAGA

[0195] In certain embodiments, a stem specific promoter may comprise but is not limited to: an Epipremnum aureum metallothionein promoter, an Epipremnum aureum dormancy-associated protein 1 promoter, an Epipremnum aureum dehydrin COR410-like promoter, an Epipremnum aureum ubiquitin-conjugating enzyme E2 8 promoter, or a combination of any characteristic portion of any one or more of these promoters.

Exemplary Epipremnum aureum metallothionein promoter (rrEaStem1)
SEQ ID NO: 45
CCCGATGAGCACCTCAGATGTCCATTTGATGCTCTTTCGTGAAGTGGATTCTCTTTGACGTACA
CATCTTATAAATATCTATATTCGTCCACACCGCTGTGCAACGATTCCCTATGTGATATATGCTG
CACGGACGGAGAGGGCGGTTGCCTGAAGGAACACATATGCTTATGTGGAGCCCAGTTCTCTTTA
TACTTTTAGTTGGCTTTGATTTAGTTTTTTTTTTTTTTTTTTGAAGTAGGAGCAGATCCTGTGT
TGTTGCAGATTTACTACCTCGGCTGCCACCCATAGAACAAGATCATATTAATCTGTCTCTTGGA
GCTGAAATATGGGGAGCAAAGAAAGGGTATTAGAAAGATTCTTAAAATTAGTAGACCTGTCCTA
AGACACTGGTGATTGAGCAGTGGCATCTGCACTTGTGGACTGTGTGCTTGTGCATGGACGCTGG
CTGGAGAGATCCGCCGACGTGCATGGCGAGGGTGCATCAATAGGACTGGACAAGGGAAGAAGAA
ACATCTGAACTGAGTATCATGTGAAATTAAAACTTTTTAATAATTTTATTTTATTTTAAATTAA
TTTTATGTGGTCCGACCACAAAAAAAACTTACAGAACATTACTGTGGTGTGAAGAAGCTCCGTC
GCCATGCTACTGGCGTGTGGGGTCGGTAAGATTGTCTCTGCCTCGACATGTGTTCCCCCCTACA
GAAGAAAAAGAGAAGAAGTGACTTGAGTGGTCGAGACGCAGCCACCCGTCTCCTCCATTATCGA
GAGGGATTCCTCTGGGGAATCCCACTCGCAAGAGCCCCAGCAATGCCTATAAATACCGGTGGAG
GCGGCCCCTCTCCAGCTCACACAGAGCCGACGTGATAAGCTCCTCCTCTCGCTTCAGCAGTTCT
CTCTTGCCTTCGCCACTTCCCATTATCGCC
Exemplary Epipremnum aureum dormancy-associated protein 1
promoter (rrEaStem2)
SEQ ID NO: 46
TGTGAGTGACCAAGTGTGCTTAAGAGCAACCAAAGACTTTGGTGAGCATCATAGTGCATTATGT
TACCCATCAAATATCATATTGCTCATCAAAAGTTACTCTGTGGATAGCACAACCTACCATGTTA
CTCATATAGAGGTGTCTAGTGAATAACAGGATGTTTTGATGGATAACATAATACATCATACTAC
TTACTAATACATTTAGTTGTTCACAAAGTATCACATTATTTATTCATCAACACATTAAGTTACT
TATGGGCATATAAAATTACTTAAAGTATCCCAATTACTGAGGAAAGATTTAGATGTATAATATT
TTTAACTTATTTCTAGTACAAATGGGGTGCACAAATAGTGAACAGAGTGAGGTCATTTTCTGAC
AATTCCATTGGGTAATTTTTTTTTACTCTCTTTTTTCTTTCAAACTGATTCAAAGAGTTTAATG
GTGACAGAGTCACATATCTAGAAGAATATTATTGGGGGCGGGTGCAATGTTGTTTGCACTACAA
GTCGACGACCGGTCGTCACGTGGATCCCATAGTGGGCCAGGTCCATGCTATGATAAAGCCCATC
AAAGGGCAGATATTTCCGTCGTCACGTGATGGAGGGGGGGCCCAAATCGTCTTCATGCTTATCC
GCTACCTGTCCATACCGCCATCACGTCACTCTCCCACAGCTTTGATCACTTCCGCCCCCTCCCG
CCCAGCTACCCTCGAGACCCGGTATTCGGACGTCTTCTCGGATCCGAAATATCCGCTGTTATCT
CGGGTTTTCTTGTTGGAGTCTCATCCTCCCCTTCACTTGAGACGATCCGGACTCGATCAGAGTG
TTAAAGGATGGGGATGGAGACGTGTGAGTGAGGGCAAAAGGAAACCTACGTACAGGTTGTCTGA
AGGAAACTTTTTCCAGCACTATCCTGCTCTCGTTACCTGTGACTATCCGTTAATTTGGCATCTG
AGCAGAATCTCTTTCTATATATGGAGTTGGCGAGGGCAGCAGCAATAGGGGTGCAGAGCCAGTG
TAGTTGTGGTTGAGAAGGAAG
Exemplary Epipremnum aureum dehydrin COR410-like promoter
(rrEaStem3)
SEQ ID NO: 47
CTGAGGACGCTTCGAGATCCACTGACCATGCCACTTTTTTTTTACGTGAACGAGGCAAGTCGGC
ATTGACGAGCGGGGATGAAAAGGGCCGTGGAGCGAAGGGGACACGCACGCTCATAATACTGTTC
TGTACGGCTTATATAGTATAAACAGATCCAGCGCAGCGCCCGCGCATGTGGCGGGGTATTGGGG
GAGGCGATGGCGCGCGTCTGCTCCCCCGCCGTGAGGCCAAGGACCTCCGGTAGGGGCGCACCGC
TCGCGGTGTATGGCGGCCGTACCGTGGACATGCATGTATGGTGGGCTTTTTTTAAGTTTGCCCC
GGATAAGTGTTACTGTTGTGGACATGCACATGCATACGATGATGGGGTCCGTCTGGGTCCGTTG
CTCTACTCATCCGATGCCACGCAAGCTCTGTAGTAAATGTATGTATATATTCGTGTGAGAAAGA
GGAACGAAAAGGGACAACTAAGCGAAGTCCGATGGCTCATCTTAATGATTAAATTACAAAAAAA
AATTATTTAGATATCTTCGTATCAAGTCTCTAGAGAATAATCTGTCATTTAAAGTTTGAGGTTA
TTTTATGGATATTTCTTTCTCCTTTAATGACTTATAAATATTAGATTTTACTTCTCTCAGTTAT
AAAATCACTCATCATTCCAACTGAGTTATTTATCTAAGATTTGATGACAAGGGGAAGACGATTA
CGATGGGCGCTCTCCAAGCGTTGCTGTGGAATTTCTCGCGGTGAGTGGCGATGACACGTGAAAC
TTTGTCACAACTACTCCAAGAATCCCACTAGCCATTAGCTTGTATGATATTAATACTGAGACTG
GTTATTAACAAACATCTAACACCACCTTTTATTTACCAGACGAGGACGGTAACGGAAAACAGGG
GAATGAAAGCAAGAGAAAGCCGACATCGGACCGACGTTCCTCGAGGCCCGATCTGATCCACTCC
AACCCGCCATCGTCAGCATCACCGTCTCAAATCAAGTCCATTTATCGCCCGCTGCGAAAGGGAA
AGGCAAAGGGTTTGAAAAAAAAAAAGAAAGGCAACGAAAGGGGGACGAAGGTGG
Exemplary Epipremnum aureum ubiquitin-conjugating enzyme E2 8
promoter (rrEaStem4)
SEQ ID NO: 48
ACATGACACTAGGCAGGATCATTCAATACAACTAACTTGAAAGATAATGAAAGAAAATAACAAT
AAGTGATTACAGTGTTAGCATTAATTATTTTTTATTATCTTCATCTTTTGTCCCACTAGTATTA
AATACTTAAAAAATGTTTAAATTATATGCGATCACTAAGATGAGGGGGAGAGGGGGGTATGAGT
AACTAAAAACATCTTTATATTATAAAAAGTAGTGCAATAAATATCACTCTATTTATATGTAAGG
GCAAATGTACAAATAAGAGAGATTCTAGGGGCTGCCTCCACAAAAGTCCCTTAAACTTGAAGAT
CCCTTCTAAGTTTTAAGATTTAACATTCTTTTTGTTGAACTAACGCAATTCCACTGAGGTTTAA
TTCAGATTTTACTTAACTAAATTAAATATTTAAAAAATATTATATTTTAAATTTATAAAAATAT
ATAAATTATTTTAAATATTATATTATTTTTTAAATTATTTATAATAATTTAGATAATCCTCAAC
AAACCATGGTTAGAAGTTCGAAGTTCAAACCTGTGCCCTACCGTTACCACCGTGTGGTTGCCTG
CGACCTGTTCGAACCGGATTCCTCTTTATATATCCTTTAAATATATTAGCGCCGCTCCTCTCTC
TCTCTCTGTCTCTCTCGCCGACGGCAGCCTCTGTCCCCTTCTACGGGTCCTCGAGGAGGGGCGG
GGCGGGCGGAGGGGGTCGGTCGCACGCAGCAGGCAGAAGAGAGAAGCATTCCACCGCGCTCTCT
TCCGCGTCCGTTCCCTCCCTCTCCGCCTCCGTTTGTTCCCTGCTTTCCTCTCAACCCTGACGGT
TTCCTCTCTTCTTTCCCCTCTCTATCTAGGGTTTCGGAGAGATTGGCACGTACCGACCGGGGTT
TCC

### Terminator and Polyadenylation Sequences

[0196] In some embodiments, a vector comprises a terminator. The term “terminator” refers to a DNA sequence recognized by enzymes/proteins that can terminate and/or end transcription of a gene or operon. For example, a terminator typically refers to, e.g., a nucleotide sequence in the DNA, that induced the release the newly synthetized transcript RNA from the transcriptional complex. This frees the RNA polymerase and associated factors related to the transcription machinery. Thus, in some embodiments, a vector comprises one of the non-limiting example terminators described herein operably linked to a coding region.

[0197] In some embodiments, a terminator can code for a 3′UTR and/or a Polyadenylation signal in the mRNA transcript. In some embodiments, a terminator can be a plant cell terminator, a viral terminator, a chimeric terminator, an engineered terminator, a tissue-specific terminator, or other types of terminator known in the art.

[0198] In some embodiments, a terminator is one listed herein as set forth in SEQ ID NOs: 49-55. In some embodiments, a terminator sequence is at least 85%, 90%, 95%, 98% or 99% identical to terminator sequence represented by any one of SEQ ID NOs: 49-55. In some embodiments, a terminator sequence is a characteristic portion of any one of SEQ ID NOs: 49-55.

[0199] In some embodiments, a vector provided herein can include a polyadenylation (poly(A)) signal sequence. Most nascent eukaryotic mRNAs possess a poly(A) tail at their 3′ end, which is added during a complex process that includes cleavage of the primary transcript and a coupled polyadenylation reaction driven by the poly(A) signal sequence (see, e.g., Proudfoot et al., Cell 108:501-512, 2002, which is incorporated herein by reference in its entirety). A poly(A) tail confers mRNA stability and transferability (Molecular Biology of the Cell, Third Edition by B. Alberts et al., Garland Publishing, 1994, which is incorporated herein by reference in its entirety). In some embodiments, a poly(A) signal sequence is positioned 3′ to the coding sequence.

[0200] As used herein, “polyadenylation” refers to the covalent linkage of a polyadenylyl moiety, or its modified variant, to a messenger RNA molecule. In eukaryotic organisms, most messenger RNA (mRNA) molecules are polyadenylated at the 3′ end. A 3′ poly(A) tail is a long sequence of adenine nucleotides (e.g., 50, 60, 70, 100, 200, 500, 1000, 2000, 3000, 4000, or 5000) added to the pre-mRNA through the action of an enzyme, polyadenylate polymerase. In some embodiments, a poly(A) tail is added onto transcripts that contain a specific sequence, e.g., a poly(A) signal. A poly(A) tail and associated proteins aid in protecting mRNA from degradation by exonucleases. Polyadenylation also plays a role in transcription termination, export of the mRNA from the nucleus, and translation. Polyadenylation typically occurs in the nucleus immediately after transcription of DNA into RNA, but also can occur later in the cytoplasm. After transcription has been terminated, an mRNA chain is cleaved through the action of an endonuclease complex associated with RNA polymerase. A cleavage site is usually characterized by the presence of the base sequence AAUAAA near the cleavage site. After the mRNA has been cleaved, adenosine residues are added to the free 3′ end at the cleavage site.

[0201] As used herein, a “poly(A) signal sequence” or “polyadenylation signal sequence” is a sequence that triggers the endonuclease cleavage of an mRNA and the addition of a series of adenosines to the 3′ end of the cleaved mRNA.

[0202] The poly(A) signal sequence can be AATAAA. The AATAAA sequence may be substituted with other hexanucleotide sequences with homology to AATAAA and that are capable of signaling polyadenylation, including ATTAAA, AGTAAA, CATAAA, TATAAA, GATAAA, ACTAAA, AATATA, AAGAAA, AATAAT, AAAAAA, AATGAA, AATCAA, AACAAA, AATCAA, AATAAC, AATAGA, AATTAA, or AATAAG (see, e.g., WO 06/12414, which is incorporated herein by reference in its entirety).

Exemplary Cauliflower Mosaic virus 35S terminator (TerCaMV35S)
SEQ ID NO: 49
AGCTTCTCTAGCTAGAGTCGATCGACAAGCTCGAGTTTCTCCATAATAATGTGTGAGTAGTTCC
CAGATAAGGGAATTAGGGTTCCTATAGGGTTTCGCTCATGTGTTGAGCATATAAGAAACCCTTA
GTATGTATTTGTATTTGTAAAATACTTCTATCAATAAAATTTCTAATTCCTAAAACCAAAATCC
AGTACTAAAATCCAGAT
Exemplary Arabidopsis thaliana Actin 2 terminator (TerAthAct2)
SEQ ID NO: 50
AGCTTGCTCTCAAGATCAAAGGCTTAAAAAGCTGGGGTTTTATGAATGGGATCAAAGTTTCTTT
TTTTCTTTTATATTTGCTTCTCCATTTGTTTGTTTCATTTCCCTTTTTGTTTTCGTTTCTATGA
TGCACTTGTGTGTGACAAACTCTCTGGGTTTTTACTTACGTCTGCGTTTCAAAAAAAAAAACCG
CTTTCGTTTTGCGTTTTAGTCCCATTGTTTTGTAGCTCTGAGTGATCGAATTGATGCCTCTTTA
TTCCTTTTGTTCCCTATAATTTCTTTCAAAACTCAGAAGAAAAACCTTGAAACTCTTTGCAATG
TTAATATAAGTATTGTATAAGATTTTTATTGATTTGGTTATTAGTCTTACTTTTGCTACCTCCA
TCTTCACTTGGAACTGATATTCTGAATAGTTAAAGCGTTACATGTGTTCCATTCACAAATGAAC
TTAAACTAGCACAAAGTCAGATATTTTAAGATCGCACCATTT
Exemplary Solanum lycopersicum Histone H4 terminator (TerSIHisH4)
SEQ ID NO: 51
AGCTTTTATGTTGGTGATATGGTGGTAAATGTAGGGATTTAGTTTACAATTGCGTATGTCTGTG
TTGGATATCTGTAGTGCTGTTCTTATGGCTTAGATCTTGTAATTTCTCATTACAGTATCAATGA
ATAGATATCAGTTTCTAGTGATGACATTGGTTCGTCTTTTAGCTGTTGATTAATTTTTCTTAAT
TGATTCATCCTATTGCAATTCTTCTGAATTTAAATTGTATACTGTGAAATTAAGAAAATTCTTG
AAATTAATGAGAATTTGAGTAATAG
Exemplary Agrobacterium tumefaciens nopaline synthase terminator
(TerNos)
SEQ ID NO: 52
AGCTTCTCTAGCTAGAGTCGATCGACAAGCTCGAGTTTCTCCATAATAATGTGTGAGTAGTTCC
CAGATAAGGGAATTAGGGTTCCTATAGGGTTTCGCTCATGTGTTGAGCATATAAGAAACCCTTA
GTATGTATTTGTATTTGTAAAATACTTCTATCAATAAAATTTCTAATTCCTAAAACCAAAATCC
AGTACTAAAATCCAGAT
Exemplary Agrobacterium tumefaciens octopine synthase terminator
(TerOcs)
SEQ ID NO: 53
AGCTTGTCCTGCTTTAATGAGATATGCGAGAAGCCTATGATCGCATGATATTTGCTTTCAATTC
TGTTGTGCACGTTGTAAAAAACCTGAGCATGTGTAGCTCAGATCCTTACCGCCGGTTTCGGTTC
ATTCTAATGAATATATCACCCGTTACTATCGTATTTTTATGAATAATATTCTCCGTTCAATTTA
CTGATTGTACCCTACTACTTATATGTACAATATTAAAATGAAAACAATATATTGTGCTGAATAG
GTTTATAGCGACATCTATGATAGAGCGCCACAATAACAAACAATTGCGTTTTATTATTACAAAT
CCAATTTTAAAAAAAGCGGCAGAACCGGTCAAACCTAAAAGACTGATTACATAAATCTTATTCA
AATTTCAAAAGTGCCCCAGGGGCTAGTATCTACGACACACCGAGCGGCGAACTAATAACGCTCA
CTGAAGGGAACTCCGGTTCCCCGCCGGCGCGCATGGGTGAGATTCCTTGAAGTTGAGTATTGGC
CGTCCGCTCTACCGAAAGTTACGGGCACCATTCAACCCGGTCCAGCACGGCGGCCGGGTAACCG
ACTTGCTGCCCCGAGAATTATGCAGCATTTTTTTGGTGTATGTGGGCCCCAAATGAAGTGCAGG
TCAAACCTTGACAGTGACGACAAATCGTTGGGCGGGTCCAGGGCGAATTTTGCGACAACATGTC
GAGGCTCAGCAGGACCGCTTGAGACCACGAA
Exemplary Agrobacterium tumefaciens mannopine synthase terminator
(TerMas)
SEQ ID NO: 54
AGCTTGGACTCCCATGTTGGCAAAGGCAACCAAACAAACAATGAATGATCCGCTCCTGCATATG
GGGCGGTTTGAGTATTTCAACTGCCATTTGGGCTGAATTGTAGACATGCTCCTGTCAGAAATTC
CGTGATCTTACTCAATATTCAGTAATCTCGGCCAATATCCTAAATGTGCGTGGCTTTATCTGTC
TTTGTATTGTTTCATCAATTCATGTAACGTTTGCTTTTCTTATGAATTTTCAAATAAATTATC
Exemplary Agrobacterium tumefaciens agropine synthase terminator
(TerAgs)
SEQ ID NO: 55
AGCTTGGACTCCCATGTTGGCAAAGGCAACCAAACAAACAATGAATGATCCGCTCCTGCATATG
GGGCGGTTTGAGTATTTCAACTGCCATTTGGGCTGAATTGTAGACATGCTCCTGTCAGAAATTC
CGTGATCTTACTCAATATTCAGTAATCTCGGCCAATATCCTAAATGTGCGTGGCTTTATCTGTC
TTTGTATTGTTTCATCAATTCATGTAACGTTTGCTTTTCTTATGAATTTTCAAATAAATTATC
Exemplary Epipremnum aureum agropine Histone H3 terminator
(Ter7.1)
SEQ ID NO: 409
GTGGCTCTTCAGTGGACGAAAGGGCCTCGTGATACGCCTATTTTTATAGGTTAATGTCATGATA
ATAATGGTTTCTTAGACGTCAGGTGGCACTTTTCGGGGAAATGTGCGCGGAACCCCTATTTGTT
TATTTTTCTAAATACATTCAAATATGTATCCGCTCATGAGACAATAACCCTGATAAATGCTTCA
ATAATATTGAAAAAGGAAGAGTATGCGCTCACGCAACTGGTCCAGAACCTTGACCGAACGCAGC
GGTGGTAACGGCGCAGTGGCGGTTTTCATGGCTTGTTATGACTGTTTTTTTGGGGTACAGTCTA
TGCCTCGGGCATCCAAGCAGCAAGCGCGTTACGCCGTGGGTCGATGTTTGATGTTATGGAGCAG
CAACGATGTTACGCAGCAGGGCAGTCGCCCTAAAACAAAGTTAAACATCATGAGGGAAGCGGTG
ATCGCCGAAGTATCGACTCAACTATCAGAGGTAGTTGGCGTCATCGAGCGCCATCTCGAACCGA
CGTTGCTGGCCGTACATTTGTACGGCTCCGCAGTGGATGGCGGCCTGAAGCCACACAGCGATAT
TGATTTGCTGGTTACGGTGACCGTAAGGCTTGATGAAACAACGCGGCGAGCTTTGATCAACGAC
CTTTTGGAAACTTCGGCTTCCCCTGGAGAGAGCGAGATTCTCCGCGCTGTAGAAGTCACCATTG
TTGTGCACGACGACATCATTCCGTGGCGTTATCCAGCTAAGCGCGAACTGCAATTTGGAGAATG
GCAGCGCAATGACATTCTTGCAGGTATCTTCGAGCCAGCCACGATCGACATTGATCTGGCTATC
TTGCTGACAAAAGCAAGAGAACATAGCGTTGCCTTGGTAGGTCCAGCGGCGGAGGAACTCTTTG
ATCCGGTTCCTGAACAGGATCTATTTGAGGCGCTAAATGAAACCTTAACGCTATGGAACTCGCC
GCCCGACTGGGCTGGCGATGAGCGAAATGTAGTGCTTACGTTGTCCCGCATTTGGTACAGCGCA
GTAACCGGCAAAATCGCGCCGAAGGATGTCGCTGCCGACTGGGCAATGGAGCGCCTGCCGGCCC
AGTATCAGCCCGTCATACTTGAAGCTAGACAGGCTTATCTTGGACAAGAAGAAGATCGCTTGGC
CTCGCGCGCAGATCAGTTGGAAGAATTTGTCCATTACGTAAAAGGCGAGATCACCAAGGTAGTC
GGCAAATAACTGTCAGACCAAGTTTACTCATATATACTTTAGATTGATTTAAAACTTCATTTTT
AATTTAAAAGGATCTAGGTGAAGATCCTTTTTGATAATCTCATGACCAAAATCCCTTAACGTGA
GTTTTCGTTCCACTGAGCGTCAGACCCCGTAGAAAAGATCAAAGGATCTTCTTGAGATCCTTTT
TTTCTGCGCGTAATCTGCTGCTTGCAAACAAAAAAACCACCGCTACCAGCGGTGGTTTGTTTGC
CGGATCAAGAGCTACCAACTCTTTTTCCGAAGGTAACTGGCTTCAGCAGAGCGCAGATACCAAA
TACTGTCCTTCTAGTGTAGCCGTAGTTAGGCCACCACTTCAAGAACTCTGTAGCACCGCCTACA
TACCTCGCTCTGCTAATCCTGTTACCAGTGGCTGCTGCCAGTGGCGATAAGTCGTGTCTTACCG
GGTTGGACTCAAGACGATAGTTACCGGATAAGGCGCAGCGGTCGGGCTGAACGGGGGGTTCGTG
CACACAGCCCAGCTTGGAGCGAACGACCTACACCGAACTGAGATACCTACAGCGTGAGCTATGA
GAAAGCGCCACGCTTCCCGAAGGGAGAAAGGCGGACAGGTATCCGGTAAGCGGCAGGGTCGGAA
CAGGAGAGCGCACGAGGGAGCTTCCAGGGGGAAACGCCTGGTATCTTTATAGTCCTGTCGGGTT
TCGCCACCTCTGACTTGAGCGTCGATTTTTGTGATGCTCGTCAGGGGGGCGGAGCCTATGGAAA
AACGCCAGCAACGCGGCCTTTTTACGGTTCCTGGCCTTTTGCTGGCCTTTTGCTCACATGTTCT
TTCCTGCGTTATCCCCTGATTCTGTGGATAACCGTATTACCGCCTTTGAGTGAGCTGATACCGC
TCGCCGCAGCCGAACGACCGAGCGCAGCGAGTCAGTGAGCGAGGAAGCGGAAGAGCGCCCAATA
CGCAAACCGCCTCTCCCCGCGCGTTGGCCGATTCATTAATCACTCTGTGGTCTCAGCTTGCTGT
AAAGAAATTGATGGGCAGTGGGCTTTTGTTACTAGTTAGTAGGAGAGGTTGCTTCAGTTTCGTC
CGTACCTGTTCTTGACCTTCTGTTTCTGGAGTCTGTACTCCGTTTGTTGTAAAGTCTTGTCCTT
TTTTTAAAACTTCTTTCTATCCACTGTTGAATGAGCCAGTAGATGCTGTCCTGTTACGCGTTTC
TCTTCTCTTGCACATGCACAGTCTCCGTTTTGTAGGATGCTGAACGAAGCTCTCGGGTTTATGG
AGGTCAATCCCTAAGTATTGTCGATTCAAAAGGGTGATGTTTTTTTCCCCCAACAAAGCTCTTC
AGTGAGTTCAACCAAGTGGGTGAGATGTGTATAGGTTACTGGACAATCTTGTTGGTTTGGAGAG
GAGAAAAAGTAGCTATATTGATCTGTGCCAGTGCTAGCACAGGGAGAGTCTTATCTTTTTGGGT
TAGTGTTACAGCTAGATGATTGAGATGATCATCTGCACTTGATTTGATCAGCTGGTTTTGTCTT
TGTAAGATTAGCCTGTCACTTGACGAAAAAAAGCGGTTTGTCTGTCCTCGGTTACGATTCAGAC
TGGTTTGGATGACGTCCATATTAAGATCCTGTATTTACGTTTGCTGCTCTCATTTTCTGCAAGC
TTTCCGAGGATGTCCAAAAGCTCGCTTGAGACCACGAA
Exemplary Epipremnum aureum agropine Histone H3 terminator
(Ter7.3)
SEQ ID NO: 410
GCTGTAAAGAAATTGATGGGCAGTGGGCTTTTGTTACTAGTTAGTAGGAGAGGTTGCTTCAGTT
TCGTCCGTACCTGTTCTTGACCTTCTGTTTCTGGAGTCTGTACTCCGTTTGTTGTAAAGTCTTG
TCCTTTTTTTAAAACTTCTTTCTATCCACTGTTGAATGAGCCAGTAGATGCTGTCCTGTTACGC
GTTTCTCTTCTCTTGCACATGCACAGTCTCCGTTTTGTAGGATGCTGAACGAAGCTCTCGGGTT
TATGGAGGTCAATCCCTAAGTATTGTCGATTCAAAAGGGTGATGTTTTTTTCCCCCAACAAAGC
TCTTCAGTGAGTTCAACCAAGTGGGTGAGATGTGTATAGGTTACTGGACAATCTTGTTGGTTTG
GAGAGGAGAAAAAGTAGCTATATTGATCTGTGCCAGTGCTAGCACAGGGAGAGTCTTATCTTTT
TGGGTTAGTGTTACAGCTAGATGATTGAGATGATCATCTGCACTTGATTTGATCAGCTGGTTTT
GTCTTTGTAAGATTAGCCTGTCACTTGACGAAAAAAAGCGGTTTGTCTGTCCTCGGTTACGATT
CAGACTGGTTTGGATGACGTCCATATTAAGATCCTGTATTTACGTTTGCTGCTCTCATTTTCTG
CAAGCTTTCCGAGGATGTCCAAAAGCTGCATTTTTTTTTTGTCGTTGGTAAATGTTACTTTCGA
TAATTTTAAGGTTGTGGCTGAGTGATACGAGGTGTTTTCTCGAAGATAATGGTCTTAGAGTTTT
ATTCTTGGCCTTCCACAAAAGGCAAAAAAAAGCTAACTCAAATGAGTTCTTAGTGTTGAGGTC

### Enhancers

[0203] In some instances, a vector can include an enhancer sequence. The term “enhancer” refers to a nucleotide sequence that can increase the level of transcription of a nucleic acid encoding a protein of interest. Enhancer sequences (generally 50-1500 bp in length) generally increase the level of transcription by providing additional binding sites for transcription-associated proteins (e.g., transcription factors). Unlike promoter sequences, in some embodiments certain enhancer sequences can act at much larger distance away from the transcription start site (e.g., as compared to a promoter). In some embodiments, an enhancer sequence is found within an intronic sequence. In some embodiments, an enhancer is an intronic sequence. In some embodiments, enhancers may act to decrease transcript degradation and/or silencing. In some embodiments, an enhancer may be inserted into the 5′ UTR of a vector. In some embodiments, an enhancer may be incorporated into a coding region of a transgene. In some embodiments, an intron acting as an enhancer may be an intron from a DEM1 gene, a DEM2 gene, a TCH3 gene, and/or a TRP1 gene. In some embodiments, additional non-limiting examples of enhancers include a RSV enhancer, a CMV enhancer, and/or a SV40 enhancer.

[0204] In some embodiments, an enhancer sequence is listed herein as set forth in SEQ ID NO: 56. In some embodiments, an enhancer sequence is at least 85%, 90%, 95%, 98% or 99% identical to an enhancer sequence represented by SEQ ID NO: 56. In some embodiments, an enhancer sequence is a characteristic portion of SEQ ID NO: 56.

Exemplary enhancer sequence, an Arabidopsis
thaliana DEMI intronic nucleotide sequence.
SEQ ID NO: 56
GTAAGCAGAACTCTAGTTGCAGTGTATATTCTTGCTGAGAAAGTGACATT
CTTGAAATTTTCATGTTTTGCTCATAGCATAAGTGCATATAATATTGAAG
TCTTAAGAATTTTTGTGGAAATTGAATTATAGTGTTCCTCAGTTGCCTTG
TGTTTCAACCTTGATTTTTGATAGAGGAACTTTTACTACTGTTGAATCAT
TCATCAATTGAAATAACTTTTTACTAATAGTTGATTCCTGACTCTTTTTG
TCTATCTTTTCTTGTTGAAAATGTCGATATATAG

### Flanking Untranslated Regions, 5′ UTRs and 3′ UTRs

[0205] In some embodiments, any of the vectors described herein can include an untranslated region (UTR), such as a 5′ UTR or a 3′ UTR. UTRs of a gene are transcribed but not translated. A 5′ UTR starts at the transcription start site and continues to the start codon but does not include the start codon. A 3′ UTR starts immediately following the stop codon and continues until the transcriptional termination signal. The regulatory and/or control features of a UTR can be incorporated into any of the vectors, compositions, kits, or methods as described herein to enhance or otherwise modulate the expression of a protein.

[0206] Natural 5′ UTRs include a sequence that plays a role in translation initiation. In some embodiments, a 5′ UTR can comprise sequences, like Kozak sequences, which are commonly known to be involved in the process by which the ribosome initiates translation of many genes. Kozak sequences have the consensus sequence CCR (A/G) CCAUGG, where R is a purine (A or G) three bases upstream of the start codon (AUG), and the start codon is followed by another “G”. In some embodiments, 5′ UTRs have also been known to form secondary structures that are involved in elongation factor binding.

[0207] In some embodiments, 5′ UTR is one listed herein as set forth in SEQ ID NOs: 57-60. In some embodiments, a 5′ UTR sequence is at least 85%, 90%, 95%, 98% or 99% identical to a 5′ UTR sequence represented by any one of SEQ ID NOs: 57-60. In some embodiments, a 5′ UTR sequence is a characteristic portion of any one of SEQ ID NOs: 57-60.

Exemplary Tobacco Mosaic Virus (TMV) 5′-leader
sequence (Omega).
SEQ ID NO: 57
GTATTTTTACAACAATTACCAACAACAACAAACAACAAACAACATTACAA
TTACTATTTACAATTAC
Exemplary Arabidopsis thaliana Alcohol
Dehydrogenase 5′ UTR.
SEQ ID NO: 58
TACATCACAATCACACAAAACTAACAAAAGATCAAAAGCAAGTTCTTCAC
TGTTGATA
Exemplary Nicotiana tabacum Alcohol Dehydrogenase
5′ UTR.
SEQ ID NO: 59
GTCTATTTCTCAGTATTCAGAAACAACAAAAGTTCTTCTCTACATAAAAT
TTTCCTATTTTAGTGATCAGTGAAGGAAATCAAGAAAAATAA
Exemplary Oryza sativa Alcohol Dehydrogense 5′
UTR.
SEQ ID NO: 60
GAATTCCAAGCAACGAACTGCGAGTGATTCAAGAAAAAAGAAAACCTGAG
CTTTCGATCTCTACGGAGTGGTTTCTTGTTCTTTGAAAAAGAGGGGGATT
A

### Internal Ribosome Entry Sites (IRES), Secretion Signals, and Cleavage Signals

[0208] In some embodiments, a vector encoding a protein can include an internal ribosome entry site (IRES). An IRES forms a complex secondary structure that allows translation initiation to occur from any position with an mRNA immediately downstream from where the IRES is located (see, e.g., Pelletier and Sonenberg, Mal. Cell. Biol. 8 (3): 1103-1112, 1988).

[0209] There are several IRES sequences known to those in skilled in the art, including those from, e.g., foot and mouth disease virus (FMDV), encephalomyocarditis virus (EMCV), human rhinovirus (HRV), cricket paralysis virus, human immunodeficiency virus (HIV), hepatitis A virus (HAV), hepatitis C virus (HCV), and poliovirus (PV). See e.g., Alberts, Molecular Biology of the Cell, Garland Science, 2002; and Hellen et al., Genes Dev. 15 (13): 1593-612, 2001, each of which is incorporated in its entirety herein by reference.

[0210] In some embodiments, a vector provided herein can include secretion signals, cleavage sites, and/or linker sequences. In some embodiments, these sites are functional in a translated protein, and result in post-translational modifications and/or processing events. In some embodiments, constructs as described herein are translated into a relatively long precursor polypeptide, such a precursor polypeptide may then undergo post translational modifications and/or processing, which may involve endogenous cellular enzymatic actions. Such a processing step may produce multiple peptides, the biological function of such peptides may be accomplished either solely by one peptide, or by the function of multiple peptides acting in concert.

[0211] In some embodiments, vectors provided herein include a signal peptide. In some embodiments, a signal peptide may be a signal sequence, targeting signal, localization signal, localization sequence, transit peptide, leader sequence or leader peptide. In some embodiments, such a sequence is generally short (e.g., approximately 15-60 amino acids in length). In some embodiments, such a signal peptide is present at the N-terminus of a peptide of interest. In some embodiments, more than one signal peptide may exist in a translational product. In some embodiments, an exemplary signal peptide comprises a localization signal. In some embodiments, such an amino acid sequence is represented by any one of SEQ ID NOs: 61-63, and can be 95%, 90%, 85%, 80%, or 75% identical to such a sequence. One skilled in the art will recognize that alternative localization signal sequences exist, and may be incorporated into vectors as described herein.

Exemplary Chloroplast localization signal amino
acid sequence
SEQ ID NO: 61
ASSMLSSAAVVTSPAQATMVAPFTGLKSSASFPVTRKANNDITSITSNGG
RVSC
Exemplary Mitochondria localization signal amino
acid sequence
SEQ ID NO: 62
MAMAVFRREGRRLLPSIAARPIAAIRSPLSSDQEEGLLGVRSISTQVVRN
R
Exemplary Peroxisome localization signal amino
acid sequence
SEQ ID NO: 63
MEKAIERQRVLLEHLRPSSSSSHNYEASLSASACLAGDSAAYQRTSLYG

[0212] In some embodiments, vectors provided herein include a linker peptide. In some embodiments, a linker peptide is utilized to join two or more functional peptides in a translational product. In some embodiments, such a linker peptide may include additional functional sequences, such as recognition sequences for endogenous peptidases. In some embodiments, a linker peptide may fuse two polypeptides together indefinitely. In some embodiments, a linker peptide sequence may be one amino acid in length, two amino acids in length, three amino acids in length, four amino acids in length, five amino acids in length, six amino acids in length, seven amino acids in length, eight amino acids in length, nine amino acids in length, ten amino acids in length, eleven amino acids in length, twelve amino acids in length, thirteen amino acids in length, fourteen amino acids in length, fifteen amino acids in length, sixteen amino acids in length, seventeen amino acids in length, eighteen amino acids in length, nineteen amino acids in length, or twenty amino acids in length. In some embodiments, a linker peptide sequence may be up to fifty amino acids in length. One skilled in the art will recognize that alternative linker sequences exist (functional or not), and may be incorporated into vectors as described herein.

[0213] In some embodiments, vectors provided herein include a peptide sequence that induces polypeptide cleavage and/or failure to form a peptide linkage during translation. In some embodiments, vectors as described herein may include a self-cleaving peptide, that in some embodiments may be a 2A self-cleaving peptide. In some embodiments, such a peptide is approximately 18 to 22 amino acids in length, e.g., 18 amino acids in length, 19 amino acids in length, 20 amino acids in length, 21 amino acids in length, or 22 amino acids in length. In some embodiments, such a peptide may induce ribosomal skipping during translation of a protein. In some embodiments, a 2A self-cleaving peptide is represented by a core sequence motif of DxExNPGP, and are found endogenously in a range of viral families. In some embodiments, a self-cleaving peptide generates polyproteins from a single transcript by causing the ribosome to fail at making a peptide bond. In some embodiments, a self-cleaving and/or cleavage signal is represented by any one of SEQ ID NOs: 64-69, or a sequence sharing approximately 95%, 90%, 80%, 75%, 70%, 65%, 60%, 55%, or 50% identity. One skilled in the art will recognize that alternative peptide cleavage sequences exist (self-cleaving or requiring the aid of endogenous cellular machinery), and may be incorporated into vectors as described herein.

-Exemplary Cleavage signal nucleotide sequence
SEQ ID NO: 64
GGCTCTGGCGAAGGCAGAGGCAGCCTGCTTACATGTGGCGACGTGGAAG
AGAACCCCGGACCT
-Exemplary Cleavage signal amino acid sequence
SEQ ID NO: 65
GSGEGRGSLLTCGDVEENPGP
-Exemplary Cleavage signal nucleotide sequence
SEQ ID NO: 66
GCCCCGGTGAAGCAGACCCTGAACTTCGACCTGCTGAAGCTGGCGGGCG
ACGTGGAGAGCAACCCGGGCCCC
-Exemplary Cleavage signal amino acid sequence
SEQ ID NO: 67
APVKQTLNFDLLKLAGDVESNPGP

[0214] In some embodiments, a ‘remnant’ 2A residue appended to the carboxyl terminus of the processed proteins can be removed by fusing an engineered mini-intein with the 2A sequence through a linker to create an ‘IntF2A’ self-excising domain. In some embodiments, an IntF2A enables co-translational cleavage via 2A's translational recoding activity, followed by post-translational autocatalytic cleavage via intein at its N-terminal junction (Zhang et al., Plant Biotechnology, 2017; incorporated herein by reference in its entirety).

-Exemplary IntF2A nucleotide sequence
SEQ ID NO: 68
TGTCTATCCTTTGGAACAGAGATATTGACAGTGGAATATGGCCCGTTACCAATAGGCAAAATCG
TGTCAGAAGAGATCAATTGCTCAGTCTATTCTGTTGATCCTGAGGGTAGAGTTTATACACAAGC
CATTGCGCAATGGCATGATAGAGGCGAACAAGAAGTCTTGGAATATGAATTAGAGGACGGGAGC
GTCATTAGGGCAACAAGTGATCATAGGTTTCTTACTACAGATTATCAACTTCTCGCCATTGAGG
AAATTTTTGCCCGACAGCTAGATCTCCTGACACTCGAAAATATTAAACAAACCGAGGAAGCGTT
GGATAATCATCGCCTCCCGTTTCCTCTCCTAGATGCAGGGACAATTAAGATGGTTAAAGTGATT
GGGAGGAGATCACTTGGTGTGCAAAGGATTTTTGATATAGGGCTCCCTCAGGACCACAACTTCT
TACTGGCTAACGGGGCAATCGCGGCAGCTTGTTCATGTGGTAGTGGGTCACGGGTAACTGAGTT
ACTTTATAGGATGAAGCGAGCTGAAACCTATTGCCCAAGACCCCTTTTGGCGATTCATCCTACA
GAAGCACGCCACAAACAAAAAATTGTGGCCCCAGTTAAACAACTTCTCAATTTTGACCTTTTGA
AGTTGGCCGGTGACGTCGAATCTAACCCCGGCCCT
-Exemplary IntF2A amino acid sequence
SEQ ID NO: 69
CLSFGTEILTVEYGPLPIGKIVSEEINCSVYSVDPEGRVYTQAIAQWHDRGEQEVLEYELEDGS
VIRATSDHRFLTTDYQLLAIEEIFARQLDLLTLENIKQTEEALDNHRLPFPLLDAGTIKMVKVI
GRRSLGVORIFDIGLPQDHNFLLANGAIAAACSCGSGSRVTELLYRMKRAETYCPRPLLAIHPT
EARHKQKIVAPVKQLLNFDLLKLAGDVESNPGP

### Splice Sites and Introns

[0215] In some embodiments, a vector provided herein can include splice donor and/or splice acceptor sequences. In some embodiments, such a splice donor and/or splice acceptor sequence may be functional during RNA processing occurring during and/or following transcription. In some embodiments, splice sites are involved in trans-splicing. In some embodiments, splices sites are involved in cis-splicing.

### Additional Sequences

[0216] In some embodiments, vectors of the present disclosure may include one or more cloning sites. In some such embodiments, cloning sites may not be fully removed prior to administration to a subject (e.g., a cell). In some embodiments, cloning sites may have functional roles, e.g., including as linker sequences, cleavage sequence, or as portions of a Kozak site. As will be appreciated by those skilled in the art, cloning sites may vary significantly in primary sequence while retaining their desired function. In some embodiments, vectors may contain any appropriate combination of cloning sites.

### Reporter Sequences or Elements

[0217] In some embodiments, vectors provided herein can optionally include a sequence encoding a reporter gene that may encode polypeptides and/or proteins (“a reporter sequence”). In some embodiments, reporter genes impart a distinct phenotype to cells expressing the reporter and thus allow transformed cells to be distinguished from cells that do not have the reporter. Such genes may encode, for example, a selectable and/or screenable reporter. In some embodiments, nucleic acid vectors comprise a reporter that allows selecting and/or screening of transformed cells.

[0218] In some embodiments, a transformed cell is grown in culture medium under conditions that select for cells that either have (positive selection) or do not have (negative selection) the reporter. In some embodiments, a combination of positive and negative selection is used. In some so-called positive selection schemes, most cells in a population are unable reproduce, e.g., because they lack the ability to use a nutrient (such as, for example, a carbon source) present in the selection medium. In some of these schemes, the selectable reporter confers an ability to use a limiting nutrient. Thus, in some embodiments, cells that have the selectable reporter gain an advantage over other cells in the population and therefore can be selected for. In some so-called negative screening/selection schemes, most cells in a population are unable to divide because of the effects of a toxic agent (such as, for example, an antibiotic present in the selection medium). In these schemes, the selectable reporter confers an ability to overcome the toxicity (for example, by blocking uptake or by chemically modifying the toxic agent). Thus, in some embodiments, cells that have the selectable reporter gain an advantage over other cells in the population and therefore can be selected for. In some embodiments, a transformed cell undergoing selection is a prokaryotic cell, e.g., such as E. coli or an Agrobacterium etc. In some embodiments, a transformed cell undergoing selection is a eukaryotic cell, such as a plant cell, yeast (for example, S. cerevisiae), mammalian cell, or insect cell. In some embodiments, a characteristic phenotype allows the identification of cells of interest, groups of cells, tissues, organs, plant parts or whole plants containing a vector of interest.

[0219] In some embodiments, vectors may include one or more nucleotide sequences encoding an appropriate selection and/or screening marker. In some embodiments, an appropriate selection marker may be encoded by nptII and/or kana and provide resistance to kanamycin. In some embodiments, an appropriate selection marker may be encoded by hpt and provide resistance to hyromycin. In some embodiments, an appropriate selection marker may be encoded by bar and provide resistance to phosphinothricin. In some embodiments, an appropriate selection marker may be encoded by gox and provide resistance to glyphosate. In some embodiments, an appropriate selection marker system includes neomycin phosphotransferase. In some embodiments, an appropriate selection marker system includes hygromycin phosphotransferase. In some embodiments, an appropriate selection marker system includes phosphoinothricin acetyltransferase. In some embodiments, an appropriate selection marker system includes glyphosate oxidoreductase.

[0220] Many examples of suitable reporter genes are known in the art and can be used in screening and/or selection schemes during methods described herein and/or during creation of compositions described herein. Reagents such as appropriate components of selection media are also known in the art. Examples of such reporter genes include, but are not limited to, phosphomannose isomerase, phosphinothricin, neomycin phosphotransferase, hygromycin phosphotransferase, enolpyruvoyl-shikimate-3-phosphate synthetase, etc.

[0221] For example, phosphomannose isomerase (PMI) catalyses the interconversion of mannose 6-phosphate and fructose 6-phosphate in prokaryotic and eukaryotic cells. After uptake, mannose is phosphorylated by endogenous hexokinases to mannose-6-phosphate. Accumulation of mannose-6-phosphate leads to a block in glycolysis by inhibition of phosphoglucose-isomerase, resulting in severe growth inhibition. Phosphomannose-isomerase is encoded by the manA gene from Escherichia coli and catalyzes the conversion of mannose-6-phosphate to fructose-6-phosphate, an intermediate of glycolysis. On media containing mannose, manA expression in transformed plant cells relieves the growth inhibiting effect of mannose-6-phosphate accumulation and permits utilization of mannose as a source of carbon and energy, allowing transformed cells to grow.

[0222] In some embodiments, reporter genes encode proteins that generate a detectable phenotype. Non-limiting examples of suitable reporter sequences include DNA sequences encoding: a beta-lactamase, a beta-galactosidase (LacZ), an alkaline phosphatase, a thymidine kinase, a green fluorescent protein (GFP), a red fluorescent protein, an mCherry fluorescent protein, a yellow fluorescent protein, a chloramphenicol acetyltransferase (CAT), and a luciferase. Additional examples of reporter sequences are known in the art. Alternatively or additionally, a reporter gene can provide some other visibly reactive response (e.g., may cause a distinctive appearance such as color or growth pattern relative to organisms or cells not expressing the selectable reporter gene in the presence of some substance, either as applied directly to the organism or cells or as present in the tissue or cell growth media). For example, it is known in the art that transcriptional activators of anthocyanin biosynthesis, operably linked to a suitable promoter in a vector, have widespread utility as non-phytotoxic markers for plant cell transformation.

[0223] In some embodiments, a reporter gene is an enhanced green fluorescence protein (eGFP) according to SEQ ID NO: 71, potentially encoded by SEQ ID NO: 70 or a codon optimized version thereof. In some embodiments, a reporter gene is an mCherry protein according to SEQ ID NO: 73, potentially encoded by SEQ ID NO: 72 or a codon optimized version thereof. In some embodiments, a reporter gene is an mRuby2 protein according to SEQ ID NO: 75, potentially encoded by SEQ ID NO: 74 or a codon optimized version thereof. In some embodiments, a reporter gene is an RRvT protein according to SEQ ID NO: 77, potentially encoded by SEQ ID NO: 76 or a codon optimized version thereof. In some embodiments, a reporter gene is an mTFP1 protein according to SEQ ID NO: 79, potentially encoded by SEQ ID NO: 80 or a codon optimized version thereof.

[0224] In some embodiments, a reporter gene may be but is not limited to eGFP, mCherry, mRubyd2, RRvT, mTFP1, RFP611, dTFP0.2, meffCFP, folding reporter GFP, ccalOFP1, tdKatushka2, vsfGFP-0, eYGFPuv, or any combination thereof.

[0225] In some embodiments, when reporter genes are associated with control elements which drive their expression, the reporter sequence can provide signals detectable by conventional means, including enzymatic, radiographic, colorimetric, fluorescence, or other spectrographic assays; fluorescent activating cell sorting (FACS) assays; immunological assays (e.g., enzyme linked immunosorbent assay (ELISA), radioimmunoassay (RIA), and immunohistochemistry).

[0226] In some embodiments, a reporter sequence is the LacZ gene, and the presence of a vector carrying the LacZ gene in a plant cell is detected by assays for beta-galactosidase activity. When the reporter is a fluorescent protein (e.g., green fluorescent protein) or luciferase, the presence of a vector carrying the fluorescent protein or luciferase in a plant cell may be measured by fluorescent techniques (e.g., fluorescent microscopy or FACS) or light production in a luminometer (e.g., a spectrophotometer or an IVIS imaging instrument). In some embodiments, a reporter sequence can be used to verify the tissue-specific targeting capabilities and tissue-specific promoter regulatory and/or control activity of any of the vectors described herein.

[0227] In some embodiments, a reporter sequence is a FLAG tag (e.g., a 3×FLAG tag), and the presence of a vector carrying the FLAG tag in a plant cell is detected by protein binding or detection assays (e.g., Western blots, immunohistochemistry, radioimmunoassay (RIA), mass spectrometry).

-Exemplary eGFP reporter nucleotide sequence
SEQ ID NO: 70
ATGGTGAGCAAGGGCGAGGAGCTGTTCACCGGGGTGGTGCCCATCCTGGTCGAGCTGGACGGCG
ACGTAAACGGCCACAAGTTCAGCGTGTCCGGCGAGGGCGAGGGCGATGCCACCTACGGCAAGCT
GACCCTGAAGTTCATCTGCACCACCGGCAAGCTGCCCGTGCCCTGGCCCACCCTCGTGACCACC
CTGACCTACGGCGTGCAGTGCTTCAGCCGCTACCCCGACCACATGAAGCAGCACGACTTCTTCA
AGTCCGCCATGCCCGAAGGCTACGTCCAGGAGCGCACCATCTTCTTCAAGGACGACGGCAACTA
CAAGACCCGCGCCGAGGTGAAGTTCGAGGGCGACACCCTGGTGAACCGCATCGAGCTGAAGGGC
ATCGACTTCAAGGAGGACGGCAACATCCTGGGGCACAAGCTGGAGTACAACTACAACAGCCACA
ACGTCTATATCATGGCCGACAAGCAGAAGAACGGCATCAAGGTGAACTTCAAGATCCGCCACAA
CATCGAGGACGGCAGCGTGCAGCTCGCCGACCACTACCAGCAGAACACCCCCATCGGCGACGGC
CCCGTGCTGCTGCCCGACAACCACTACCTGAGCACCCAGTCCGCCCTGAGCAAAGACCCCAACG
AGAAGCGCGATCACATGGTCCTGCTGGAGTTCGTGACCGCCGCCGGGATCACTCTCGGCATGGA
CGAGCTGTACAAG
-Exemplary eGFP reporter amino acid sequence
SEQ ID NO: 71
MVSKGEELFTGVVPILVELDGDVNGHKFSVSGEGEGDATYGKLTLKFICTTGKLPVPWPTLVTT
LTYGVQCFSRYPDHMKQHDFFKSAMPEGYVQERTIFFKDDGNYKTRAEVKFEGDTLVNRIELKG
IDFKEDGNILGHKLEYNYNSHNVYIMADKQKNGIKVNFKIRHNIEDGSVQLADHYQQNTPIGDG
PVLLPDNHYLSTQSALSKDPNEKRDHMVLLEFVTAAGITLGMDELYK
-Exemplary mCherry reporter nucleotide sequence
SEQ ID NO: 72
ATGGTGAGCAAGGGCGAGGAGGATAACATGGCCATCATCAAGGAGTTCATGCGCTTCAAGGTGC
ACATGGAGGGCTCCGTGAACGGCCACGAGTTCGAGATCGAGGGCGAGGGCGAGGGCCGCCCCTA
CGAGGGCACCCAGACCGCCAAGCTGAAGGTGACCAAGGGTGGCCCCCTGCCCTTCGCCTGGGAC
ATCCTGTCCCCTCAGTTCATGTACGGCTCCAAGGCCTACGTGAAGCACCCCGCCGACATCCCCG
ACTACTTGAAGCTGTCCTTCCCCGAGGGCTTCAAGTGGGAGCGCGTGATGAACTTCGAGGACGG
CGGCGTGGTGACCGTGACCCAGGACTCCTCCCTGCAGGACGGCGAGTTCATCTACAAGGTGAAG
CTGCGCGGCACCAACTTCCCCTCCGACGGCCCCGTAATGCAGAAGAAAACCATGGGCTGGGAGG
CCTCCTCCGAGCGGATGTACCCCGAGGACGGCGCCCTGAAGGGCGAGATCAAGCAGAGGCTGAA
GCTGAAGGACGGCGGCCACTACGACGCTGAGGTCAAGACCACCTACAAGGCCAAGAAGCCCGTG
CAGCTGCCCGGCGCCTACAACGTCAACATCAAGTTGGACATCACCTCCCACAACGAGGACTACA
CCATCGTGGAACAGTACGAACGCGCCGAGGGCCGCCACTCCACCGGCGGCATGGACGAGCTGTA
CAAGTAA
-Exemplary mCherry reporter amino acid sequence
SEQ ID NO: 73
MVSKGEEDNMAIIKEFMRFKVHMEGSVNGHEFEIEGEGEGRPYEGTQTAKLKVTKGGPLPFAWD
ILSPQFMYGSKAYVKHPADIPDYLKLSFPEGFKWERVMNFEDGGVVTVTQDSSLQDGEFIYKVK
LRGTNFPSDGPVMQKKTMGWEASSERMYPEDGALKGEIKQRLKLKDGGHYDAEVKTTYKAKKPV
QLPGAYNVNIKLDITSHNEDYTIVEQYERAEGRHSTGGMDELYK
-Exemplary mRuby reporter nucleotide sequence
SEQ ID NO: 74
ATGGTGTCAAAAGGTGAGGAGCTAATCAAAGAGAACATGCGAATGAAAGTGGTCATGGAAGGGA
GCGTAAACGGCCACCAGTTCAAATGCACAGGCGAGGGCGAGGGCAACCCATACATGGGTACGCA
GACCATGAGGATAAAAGTAATCGAGGGTGGTCCGTTGCCATTCGCCTTCGACATCCTGGCAACC
TCGTTCATGTACGGGAGTCGAACATTCATCAAATACCCAAAAGGTATACCGGACTTCTTCAAAC
AGAGTTTCCCGGAAGGTTTCACCTGGGAGCGGGTCACAAGGTACGAGGACGGTGGTGTCGTGAC
AGTAATGCAGGACACATCCTTAGAGGACGGTTGCCTGGTCTACCACGTCCAGGTGCGTGGCGTC
AACTTCCCCTCAAACGGCCCAGTAATGCAGAAGAAAACCAAAGGTTGGGAGCCGAACACAGAGA
TGATGTACCCGGCGGACGGTGGCCTGCGTGGTTACACACACATGGCATTAAAAGTGGACGGTGG
TGGTCACCTCTCGTGCTCGTTCGTCACAACCTACCGAAGCAAGAAAACGGTCGGGAACATCAAA
ATGCCGGGTATACACGCAGTCGACCACCGTCTCGAGCGTTTAGAGGAGAGCGACAACGAGATGT
TCGTCGTGCAGCGAGAGCACGCAGTGGCCAAATTCGCGGGTCTAGGCGGCGGGATGGACGAGTT
ATACAAATGA
-Exemplary mRuby reporter amino acid sequence
SEQ ID NO: 75
MVSKGEELIKENMRMKVVMEGSVNGHQFKCTGEGEGNPYMGTQTMRIKVIEGGPLPFAFDILAT
SFMYGSRTFIKYPKGIPDFFKQSFPEGFTWERVTRYEDGGVVTVMQDTSLEDGCLVYHVQVRGV
NFPSNGPVMQKKTKGWEPNTEMMYPADGGLRGYTHMALKVDGGGHLSCSFVTTYRSKKTVGNIK
MPGIHAVDHRLERLEESDNEMFVVQREHAVAKFAGLGGGMDELYK
-Exemplary RRvT reporter nucleotide sequence
SEQ ID NO: 76
ATGGTATCAAAAGGGGAAGAGGTGATCAAAGAGTTCATGCGTTTCAAAGTACGAATGGAAGGTT
CCATGAACGGGCACGAGTTCGAGATAGAGGGTGAGGGTGAGGGTAGGCCATACGAGGGCACACA
GACGGCCAAACTGAAAGTAACCAAAGGTGGCCCACTCCCATTCGCGTGGGACATCTTGAGTCCA
CAGTTCATGTACGGTAGCAAAGCCTACGTCAAACACCCGGCCGACATACCAGACTACAAGAAAC
TAAGTTTCCCAGAGGGGTTCAAATGGGAGCGAGTAATGAACTTCGAGGACGGCGGCCTGGTCAC
GGTGACCCAGGACTCGAGTTTACAGGACGGTACCTTGATATACAACGTCAAAATGCGGGGTACA
AACTTTCCCCCAGACGGCCCCGTAATGCAGAAGAAAACAATGGGTTGGGAAGCAAGCACAGAGC
GTTTGTACCCAAGGGACGGTGTGCTAAAAGGTGAGATCCACCAGGCACTAAAATTAAAAGACGG
CGGTCACTACCTAGTCGAGTTCAAAACCATATACATGGCGAAGAAACCCGTGCAGCTCCCAGGT
TACTACTACGTAGACACCAAATTAGACATCACGTCGCACAACGAGGACTACACGATCGTCGAGC
AGTACGAGCGTAGCGAGGGTCGACACCACCTCTTCCTATACGGTATGGACGAGCTCTACAAA
-Exemplary RRvT reporter amino acid sequence
SEQ ID NO: 77
MVSKGEEVIKEFMRFKVRMEGSMNGHEFEIEGEGEGRPYEGTQTAKLKVTKGGPLPFAWDILSP
QFMYGSKAYVKHPADIPDYKKLSFPEGFKWERVMNFEDGGLVTVTQDSSLQDGTLIYNVKMRGT
NFPPDGPVMQKKTMGWEASTERLYPRDGVLKGEIHQALKLKDGGHYLVEFKTIYMAKKPVQLPG
YYYVDTKLDITSHNEDYTIVEQYERSEGRHHLFLYGMDELYK
-Exemplary mTFP1 reporter nucleotide sequence
SEQ ID NO: 78
ATGGTCAGTAAAGGTGAGGAGACGACGATGGGTGTCATAAAACCAGACATGAAAATAAAACTGA
AAATGGAAGGTAACGTCAACGGCCACGCATTCGTAATCGAGGGTGAGGGTGAGGGGAAACCATA
CGACGGGACGAACACCATAAACCTGGAAGTGAAAGAGGGTGCCCCACTACCATTCTCATACGAC
ATCCTGACAACCGCGTTCGCCTACGGTAACAGGGCATTCACCAAATACCCCGACGACATCCCAA
ACTACTTCAAACAGTCATTCCCAGAGGGTTACAGTTGGGAGAGGACAATGACATTCGAGGACAA
AGGGATCGTGAAAGTGAAAAGCGACATCAGCATGGAAGAGGACTCCTTCATCTACGAGATCCAC
TTGAAAGGTGAGAACTTCCCACCCAACGGTCCCGTAATGCAGAAGAAAACAACCGGTTGGGACG
CATCAACCGAGCGGATGTACGTAAGGGACGGCGTCTTAAAAGGTGACGTGAAACACAAACTGCT
GTTGGAAGGTGGTGGGCACCACAGGGTCGACTTCAAAACCATATACCGAGCAAAGAAAGCCGTG
AAATTGCCAGACTACCACTTCGTCGACCACCGGATAGAGATACTAAACCACGACAAAGACTACA
ACAAAGTAACCGTGTACGAGAGTGCCGTAGCGCGAAACTCCACAGACGGCATGGACGAGCTGTA
CAAATGA
-Exemplary mTFP1 reporter amino acid sequence
SEQ ID NO: 79
MVSKGEETTMGVIKPDMKIKLKMEGNVNGHAFVIEGEGEGKPYDGTNTINLEVKEGAPLPFSYD
ILTTAFAYGNRAFTKYPDDIPNYFKQSFPEGYSWERTMTFEDKGIVKVKSDISMEEDSFIYEIH
LKGENFPPNGPVMQKKTTGWDASTERMYVRDGVLKGDVKHKLLLEGGGHHRVDFKTIYRAKKAV
KLPDYHFVDHRIEILNHDKDYNKVTVYESAVARNSTDGMDELYK
-Exemplary RFP611 reporter nucleotide sequence
SEQ ID NO: 80
ATGAACTCATTAATCAAAGAGAACATGCGTATGATGGTGGTCATGGAAGGCTCGGTCAACGGTT
ACCAGTTCAAATGCACAGGTGAGGGTGACGGTAACCCATACATGGGTACCCAGACAATGCGTAT
CAAAGTGGTAGAGGGCGGTCCATTGCCCTTCGCGTTCGACGTACTGGCAACCAGTTTCATGTAC
GGTTCAAAGACGTTCATCAAACACACCAAAGGTATACCCGACTTCTTCAAACAGTCATTCCCAG
AGGGTTTCACATGGGAGCGGGTGACGAGGTACGAGGACGGTGGTGTCATCACCGTGATGCAGGA
CACATCGCTCGAGGACGGCTGCTTGGTGTACCACGCCAAAGTGACGGGCGTCAACTTCCCCAGT
AACGGTGCAGTCATGCAGAAGAAAACGAAAGGGTGGGAGCCAAACACGGAGATGTTATACCCCG
CCGACGGCGGTCTGCGAGGTTACAGTCAGATGGCCCTGAACGTGGACGGGGGGGGTTACTTGTC
GTGCTCCTTCGAGACAACGTACAGGAGTAAGAAAACGGTAGAGAACTTCAAAATGCCAGGCTTC
CACTTCGTCGACCACCGTTTGGAGCGTCTCGAGGAGAGTGACAAAGAGATGTTCGTGGTCCAGC
ACGAGCACGCCGTGGCAAAATTCTGCGATCTCCCATCAAAACTCGGTAGGCTGTAG
-Exemplary RFP611 reporter amino acid sequence
SEQ ID NO: 81
MNSLIKENMRMMVVMEGSVNGYQFKCTGEGDGNPYMGTQTMRIKVVEGGPLPFAFDVLATSFMY
GSKTFIKHTKGIPDFFKQSFPEGFTWERVTRYEDGGVITVMQDTSLEDGCLVYHAKVTGVNFPS
NGAVMQKKTKGWEPNTEMLYPADGGLRGYSQMALNVDGGGYLSCSFETTYRSKKTVENFKMPGF
HFVDHRLERLEESDKEMFVVQHEHAVAKFCDLPSKLGRL
-Exemplary dTFP0.2 reporter nucleotide sequence
SEQ ID NO: 82
ATGGTGTCGAAAGGTGAGGAGACGACTATGGGCGTGATCAAACCAGACATGAAAATCAAACTGA
AAATGGAAGGTAACGTCAACGGTCACGCATTCGTAATCGAGGGTGAAGGGGAAGGCAAACCATA
CGACGGTACAAACACAGTCAACTTGGAAGTCAAAGAGGGCGCACCACTGCCGTTCAGTTACGAC
ATCCTCAGTAACGCATTCCAGTACGGTAACCGTGCATTCACAAAATACCCCGACGACATCGCAA
ACTACTTCAAACAGTCATTCCCAGAGGGTTACAGCTGGGAGCGGACAATGACATTCGAGGACAA
AGGGATCGTAAAAGTGAAAAGTGACATATCAATGGAAGAGGACTCATTCATCTACGAGATAAGG
TTAAAAGGGAAGAACTTCCCACCAAACGGTCCAGTGATGCAGAAGAAAACACTCAAATGGGAGC
CATCAACCGAGATCCTCTACGTGCGTGACGGTGTCTTGGTGGGTGACATCTCACACAGTTTGCT
GCTCGAGGGTGGCGGTCACTACCGGTGCGACTTCAAAACCATCTACAAAGCCAAGAAAGTAGTC
AAACTGCCCGACTACCACTTCGTCGACCACAGGATAGAGATCTTGAACCACGACAAAGACTACA
ACAAAGTCACATTGTACGAGAACGCAGTGGCCCGATACAGCCTGTTACCACCACAGGCCGGGAT
GGACGAGTTGTACAAATGA
-Exemplary dTFP0.2 reporter amino acid sequence
SEQ ID NO: 83
MVSKGEETTMGVIKPDMKIKLKMEGNVNGHAFVIEGEGEGKPYDGTNTVNLEVKEGAPLPFSYD
ILSNAFQYGNRAFTKYPDDIANYFKQSFPEGYSWERTMTFEDKGIVKVKSDISMEEDSFIYEIR
LKGKNFPPNGPVMQKKTLKWEPSTEILYVRDGVLVGDISHSLLLEGGGHYRCDFKTIYKAKKVV
KLPDYHFVDHRIEILNHDKDYNKVTLYENAVARYSLLPPQAGMDELYK
-Exemplary meffCFP reporter nucleotide sequence
SEQ ID NO: 84
ATGGCATTGAGCAAACAGTCCCTACCCAGCGACATGAAATTGATCTACCACATGGACGGGAACG
TGAACGGTCACTCCTTCGTCATAAAAGGCGAGGGTGAGGGTAAACCATACGAGGGCACACACAC
AATAAAACTGCAGGTAGTCGAGGGTAGTCCGCTGCCGTTCAGCGCCGACATACTGTCAACCGTA
TTCCAGTACGGTAACCGATGCTTCACAAAATACCCACCAAACATAGTGGACTACTTCAAGAACT
CATGCTCCGGTGGTGGCTACAAATTCGGGCGTTCATTCCTATACGAGGACGGCGCGGTCTGCAC
AGCAAGTGGTGACATAACACTCAGTGCAGACAAGAAATCATTCGAGCACAAATCGAAATTCCTG
GGCGTGAACTTCCCAGCAGACGGCCCGGTGATGAAGAAAGAGACAACAAACTGGGAGCCATCAT
GCGAGAAAATGACGCCCAACGGCATGACGTTGATCGGGGACGTCACAGGCTTCTTATTAAAAGA
GGACGGGAAACGGTACAAATGCCAGTTCCACACCTTCCACGACGCCAAAGACAAAAGCAAGAAG
ATGCCGATGCCAGACTTCCACTTCGTGCAGCACAAAATAGAGCGGAAAGACCTGCCAGGTTCAA
TGCAGACATGGCGACTGACAGAGCACGCAGCCGCGTGCAAAACGTGCTTCACCGAGTGA
-Exemplary meffCFP reporter amino acid sequence
SEQ ID NO: 85
MALSKQSLPSDMKLIYHMDGNVNGHSFVIKGEGEGKPYEGTHTIKLQVVEGSPLPFSADILSTV
FQYGNRCFTKYPPNIVDYFKNSCSGGGYKFGRSFLYEDGAVCTASGDITLSADKKSFEHKSKFL
GVNFPADGPVMKKETTNWEPSCEKMTPNGMTLIGDVTGFLLKEDGKRYKCQFHTFHDAKDKSKK
MPMPDFHFVQHKIERKDLPGSMQTWRLTEHAAACKTCFTE
-Exemplary Folding Reporter GFP reporter nucleotide sequence
SEQ ID NO: 86
ATGAGTAAAGGTGAGGAACTGTTCACAGGCGTTGTACCGATCCTGGTGGAGTTAGACGGCGACG
TGAACGGTCACAAATTCTCAGTCAGTGGTGAGGGTGAGGGCGACGCCACATACGGTAAATTGAC
ACTGAAATTCATATGCACAACAGGTAAATTGCCCGTACCCTGGCCAACGTTGGTAACAACCCTA
ACGTACGGTGTCCAGTGCTTCTCGCGATACCCAGACCACATGAAACGTCACGACTTCTTCAAAA
GCGCGATGCCAGAGGGTTACGTCCAGGAGCGAACAATATCATTCAAAGACGACGGTAACTACAA
AACAAGGGCAGAGGTGAAATTCGAGGGTGACACATTAGTCAACCGAATAGAGTTAAAAGGTATC
GACTTCAAAGAGGACGGTAACATACTAGGTCACAAACTCGAGTACAACTACAACTCCCACAACG
TCTACATAACAGCGGACAAACAGAAGAACGGTATCAAAGCAAACTTCAAAATCAGGCACAACAT
CGAGGACGGCTCAGTGCAGCTCGCGGACCACTACCAGCAGAACACACCCATCGGTGACGGTCCG
GTCTTACTCCCCGACAACCACTACCTATCAACGCAGTCCGCCCTGAGTAAAGACCCAAACGAGA
AACGTGACCACATGGTCCTACTCGAGTTCGTAACAGCAGCGGGGATAACCCACGGTATGGACGA
GTTATACAAATGA
-Exemplary Folding Reporter GFP reporter amino acid sequence
SEQ ID NO: 87
MSKGEELFTGVVPILVELDGDVNGHKFSVSGEGEGDATYGKLTLKFICTTGKLPVPWPTLVTTL
TYGVQCFSRYPDHMKRHDFFKSAMPEGYVQERTISFKDDGNYKTRAEVKFEGDTLVNRIELKGI
DFKEDGNILGHKLEYNYNSHNVYITADKQKNGIKANFKIRHNIEDGSVQLADHYQQNTPIGDGP
VLLPDNHYLSTQSALSKDPNEKRDHMVLLEFVTAAGITHGMDELYK
-Exemplary ccalOFP1 reporter nucleotide sequence
SEQ ID NO: 88
ATGTCCCTCTCGAAACAAGTATTACCAAGAGACGTTAAAATGCGATTCCACATGGACGGTTGCG
TGAACGGCCACTCATTCACGATAGAAGGAGAGGGTACCGGGAAACCGTACGAGGGTAAGAAAAC
GTTGAAACTCAGGGTGACAAAAGGTGGTCCGCTACCGTTCGCCTTCGACATCCTGTCGGCGACC
TTCACGTACGGCAACAGGTGCTTCTGCGACTACCCAGAGGAGATGCCCGACTACTTCAAACAGA
GTTTACCAGAGGGTTACAGCTGGGAGAGGACGATGATGTACGAGGACGGTGCATGCTCAACAGC
GAGTGCCCACATCAGTTTGGACAAAGACTGCTTCATCCACAACAGTACATTCCACGGTGTGAAC
TTCCCAGCGAACGGCCCAGTCATGCAGAAGAAGGCGATGAACTGGGAGCCGAGCTCAGAGTTAA
TAACCCCATGCGACGGGATCTTGAAAGGCGACGTAACGATGTTCTTACTACAAGAGGGTGGTCA
CCGTCACAAATGCCAGTTCACAACTTCCTACAAAGCCCACAAAGCGGTCAAAATCCCGCCAAAC
CACATCATCGAGCACAGGTTGGTACGTAAAGAGGTGGGTGACGCAGTCCAGATCCAGGAGCACG
CAGTGGCGAAACACTTCACAGTCCAGATAAAAGAGGCGTGA
-Exemplary ccalOFP1 reporter amino acid sequence
SEQ ID NO: 89
MSLSKQVLPRDVKMRFHMDGCVNGHSFTIEGEGTGKPYEGKKTLKLRVTKGGPLPFAFDILSAT
FTYGNRCFCDYPEEMPDYFKQSLPEGYSWERTMMYEDGACSTASAHISLDKDCFIHNSTFHGVN
FPANGPVMQKKAMNWEPSSELITPCDGILKGDVTMFLLQEGGHRHKCQFTTSYKAHKAVKIPPN
HIIEHRLVRKEVGDAVQIQEHAVAKHFTVQIKEA
-Exemplary tdKatushka2 reporter nucleotide sequence
SEQ ID NO: 90
ATGTCAGAGTTGATAAAAGAGAACATGCACATGAAATTATACATGGAAGGTACCGTAAACAACC
ACCACTTCAAATGCACCTCAGAGGGAGAGGGTAAACCGTACGAGGGTACACAGACAATGAAAAT
CAAAGTGGTCGAGGGTGGTCCCCTACCATTCGCGTTCGACATCCTGGCCACCAGTTTCATGTAC
GGCTCAAAGACGTTCATAAACCACACACAGGGGATACCCGACTTCTTCAAACAGTCATTCCCAG
AGGGCTTCACCTGGGAGCGAATCACAACATACGAGGACGGCGGTGTGTTGACAGCAACGCAGGA
CACATCCCTGCAGAACGGTTGCATAATATACAACGTTAAAATAAACGGTGTCAACTTCCCATCG
AACGGGAGTGTGATGCAGAAGAAAACCTTAGGTTGGGAAGCCAACACCGAGATGTTGTACCCCG
CCGACGGCGGCCTACGGGGACACAGTCAGATGGCCTTAAAACTAGTGGGTGGTGGTTACCTACA
CTGCAGTTTCAAAACAACCTACCGTAGCAAGAAACCAGCGAAGAACCTCAAAATGCCAGGTTTC
CACTTCGTGGACCACCGTCTCGAGAGGATCAAAGAGGCGGACAAAGAGACATACGTGGAGCAGC
ACGAGATGGCGGTCGCGAAATACTGCGACCTACCATCCAAACTAGGTCACCGTTAG
-Exemplary tdKatushka2 reporter amino acid sequence
SEQ ID NO: 91
MSELIKENMHMKLYMEGTVNNHHFKCTSEGEGKPYEGTQTMKIKVVEGGPLPFAFDILATSFMY
GSKTFINHTQGIPDFFKQSFPEGFTWERITTYEDGGVLTATQDTSLQNGCIIYNVKINGVNFPS
NGSVMQKKTLGWEANTEMLYPADGGLRGHSQMALKLVGGGYLHCSFKTTYRSKKPAKNLKMPGF
HFVDHRLERIKEADKETYVEQHEMAVAKYCDLPSKLGHR
-Exemplary vsfGFP-0 reporter nucleotide sequence
SEQ ID NO: 92
ATGTCTAAAGGAGAGGAGTTGTTCACTGGTGTCGTGCCGATCCTGGTCGAGCTCGACGGTGACG
TCAACGGGCACAAATTCTCAGTCCGAGGTGAGGGCGAGGGTGACGCAACAAACGGTAAATTGAC
ACTGAAATTCATCTGCACGACGGGTAAATTACCGGTACCGTGGCCAACATTGGTGACGACACTG
ACATACGGTGTGCAGTGCTTCAGCCGATACCCCGACCACATGAAACGACACGACTTCTTCAAAT
CAGCAATGCCAGAGGGTTACGTACAGGAGAGGACGATCAGCTTCAAAGACGACGGCACCTACAA
AACCCGTGCGGAAGTGAAATTCGAGGGTGACACCTTGGTCAACCGAATCGAGTTGAAAGGTATC
GACTTCAAAGAGGACGGTAACATATTAGGTCACAAATTGGAGTACAACTTCAACAGTCACAACG
TCTACATCACAGCCGACAAACAGAAGAACGGTATCAAAGCCAACTTCAAAATCCGTCACAACGT
AGAGGACGGCTCCGTGCAGCTAGCGGACCACTACCAGCAGAACACGCCAATCGGGGACGGCCCC
GTACTGCTGCCAGACAACCACTACCTATCAACACAGAGCGTGCTCTCAAAAGACCCAAACGAGA
AACGGGACCACATGGTGTTGTTGGAGTTCGTAACGGCGGCAGGTATAGCGCAGGTGCAGTTGGT
AGAGTCAGGTGGGGCATTGGTACAGCCAGGTGGTTCACTGCGGTTATCATGCGCAGCATCAGGT
TTCCCGGTAAACAGGTACTCCATGCGATGGTACCGGCAGGCACCGGGTAAAGAGAGGGAGTGGG
TGGCGGGTATGTCCAGTGCGGGTGACAGGTCGTCGTACGAGGACTCAGTCAAAGGTAGGTTCAC
CATAAGTAGGGACGACGCACGAAACACCGTGTACCTGCAGATGAACAGTCTAAAACCAGAGGAC
ACAGCGGTGTACTACTGCAACGTCAACGTAGGTTTCGAGTACTGGGGTCAGGGTACGCAGGTGA
CAGTGTCGTGA
-Exemplary vsfGFP-O reporter amino acid sequence
SEQ ID NO: 93
MSKGEELFTGVVPILVELDGDVNGHKFSVRGEGEGDATNGKLTLKFICTTGKLPVPWPTLVTTL
TYGVQCFSRYPDHMKRHDFFKSAMPEGYVQERTISFKDDGTYKTRAEVKFEGDTLVNRIELKGI
DFKEDGNILGHKLEYNFNSHNVYITADKQKNGIKANFKIRHNVEDGSVQLADHYQQNTPIGDGP
VLLPDNHYLSTQSVLSKDPNEKRDHMVLLEFVTAAGIAQVQLVESGGALVQPGGSLRLSCAASG
FPVNRYSMRWYRQAPGKEREWVAGMSSAGDRSSYEDSVKGRFTISRDDARNTVYLQMNSLKPED
TAVYYCNVNVGFEYWGQGTQVTVS
-Exemplary eYGFPuv reporter nucleotide sequence
SEQ ID NO: 94
ATGACCACATTCAAAATCGAGAGTAGGATCCACGGTAACTTGAACGGCGAGAAATTCGAGCTAG
TAGGCGGTGGTGTAGGGGAAGAGGGAAGGCTCGAGATCGAGATGAAAACAAAAGACAAACCGTT
AGCATTCTCGCCATTCCTGTTGACAACGTGCATGGGTTACGGTTTCTACCACTTCGCTTCCTTC
CCGAAAGGTATAAAGAACATATACTTGCACGCAGCCACGAACGGCGGCTACACCAACACACGTA
AAGAGATATACGAGGACGGTGGTATACTGGAAGTCAACTTCAGGTACACGTACGAGTTCAACAA
AATCATCGGCGACGTGGAGTGCATAGGTCACGGCTTCCCCTCGCAGTCCCCAATCTTCAAAGAC
ACAATAGTCAAATCGTGCCCAACGGTGGACTTAATGCTGCCAATGAGCGGGAACATAATCGCCT
CATCCTACGCATACGCATTCCAGCTCAAAGACGGTAGTTTCTACACAGCCGAGGTCAAGAACAA
CATAGACTTCAAGAACCCAATACACGAGTCCTTCTCAAAATCCGGGCCGATGTTCACACACCGT
CGGGTTGAGGAGACACTAACAAAAGAGAACCTGGCAATAGTGGAGTACCAGCAGGTGTTCAACT
CGGCCCCGCGGGACATGTGA
-Exemplary eYGFPuv reporter amino acid sequence
SEQ ID NO: 95
MTTFKIESRIHGNLNGEKFELVGGGVGEEGRLEIEMKTKDKPLAFSPFLLTTCMGYGFYHFASF
PKGIKNIYLHAATNGGYTNTRKEIYEDGGILEVNFRYTYEFNKIIGDVECIGHGFPSQSPIFKD
TIVKSCPTVDLMLPMSGNIIASSYAYAFQLKDGSFYTAEVKNNIDFKNPIHESFSKSGPMFTHR
RVEETLTKENLAIVEYQQVFNSAPRDM

### Gene of Interest

[0228] In some embodiments, compositions and methods are provided herein comprise a gene of interest. In some embodiments, a gene of interest is nucleic acid coding sequence that codes for a protein of interest. In some embodiments, a protein of interest is a protein that may metabolize a pollutant (e.g., as described herein). In some embodiments, a protein of interest is a part of a metabolic pathway. In some embodiments, transgenic vectors as described herein comprise more than one protein of interest. In some embodiments, a transgenic vector comprises one gene of interest. In some embodiments, a transgenic vector comprises two genes of interest. In some embodiments, a transgenic vector comprises three genes of interest. In some embodiments, a transgenic vector comprises four genes of interest. In some embodiments, a transgenic vector comprises five genes of interest. In some embodiments, a transgenic vector comprises six genes of interest. In some embodiments, a transgenic vector comprises seven genes of interest. In some embodiments, a transgenic vector comprises eight genes of interest. In some embodiments a transgenic vector comprises nine genes of interest. In some embodiments, a transgenic vector comprises ten genes of interest. In some embodiments, more than one gene of interest are influence by the same regulatory elements. In some embodiments, each of more than one gene of interests in a transgenic vector is controlled by the same regulatory elements. In some embodiments, each of more than one gene of interests in a transgenic vector is controlled by unique regulatory elements.

[0229] In some embodiments a gene of interest may be, but is not limited to: ANT1, ANT1_mut, AtCaprice, atFDH-1.1, AtGlabra1, AtGlabra2, AtGlabra3, AtPAP1, AtStomagen, AtStomagen (Ea codon optimized), AtStomagen (Ea), AtWRI1, AtWRI4, Bar, Bmoa_AP, BMOA_PA, CaMYBA (Ea), CaMYC (Ea), ccalOFP1, CER1, CER6, CPH, CrtW, CrtW (Ea codon optimized), CrtW (Ea), CrtZ, CrtZ (Ea codon optimized), CrtZ (Ea), DAK_Cf, DAK_Ec, DAK_Pp, DAK2_Yeast, DAS_Canbo, Delila, Delila_mut, DHAK-2yeast, DHAK-cf, DHAK-ec, Dhak-PP, dTFP0.2, Dummy, EaFALDH, EaFALDH-IntF2A-AtFDH1.3 (Ea codon optimized), EaFALDH-IntF2a-AtFDH1.3 (Ea), EaZIP, EaZIP_mut, eYGFPuv, FALDH_10, FALDH_11, FALDH_9, FALDH_Ea*, FALDH-11, FALDH-9, FALDH-EA, FALDHP, FDH_3, FDH_3 (Chloro), FDH_3 (Cyto), FDH_Pp, FDH3, FDH3_cyto, FDH3_mito, FhMYB5 (Ea), FhTT8 L (Ea), Folding Reporter GFP, Formolase, GhPAP1, Glabra1, Glabra2, Glabra3, Glucoronidase, GUS, H3H, HispS, HPS/PHI_a, HPS/PHI_Bm (Ea), HPS/PHI_Bm fusion (Ea codon optimized), HPS/PHI_Mg fuqion (Ea codon optimized), HPS/PHIA, HPS-BM, HPS-MG, HPT (Ea codon optimized), KANA, Level M end-linker 2, Level M end-linker 3, Level M end-linker 4, Level M end-linker 5, Level M end-linker 7, Luz, mCherry, meffCFP, mRuby2, mTFP1, MYB306, Nanoluc, nptII (kana), NtMyb123, NtMyb23, OsGL1-1, OsX1, OsX2, P19, P35S-eGFP, P450_2E1, P450_RR, P450-2E1, P540_RR, PHE_OH, PHI-BM, PHI-MG, PPvUbi2-eGFP, PvUbi1+3-eGFP, PZmUbi1-eGFP, RFP611, Rosea_mut, Roseal, Roseal_mut, RRvT monomer, Tbual, TBUA1_Mp, tdKatushka2, tmoA_Pm, Tmoa_SP, TMOF_PM, To_Woolly, TOD_C₁, Tod-C₁, TodC1 (Ea codon optimized), TodC1 (Ea), toua_SP, TouA_SP_OX1, Toua-SP, TurboGFP, vsfGFP-0, VvMYBA5, VvMYBA6, ZmLc, ZmPl, SMH1, GLO1, GLO2, or any combination thereof.

### Gene of Interest Knockout or Knockdown

[0230] In some embodiments, compositions and methods are provided herein that utilize the silencing of endogenous plant transgene regulatory elements. In some embodiments, this may be performed using gene editing mechanisms such as TALENs, Zinc-Finger nucleases, and/or CRISPR mediated mutations (e.g., any mutation that creates a knock-down, knock-out, or otherwise reduced function allele).

[0231] In some embodiments, the gene RDR6 is targeted, this gene and its associated pathway have been implicated in the silencing of transgenes [Luo & Chen, Plant Cell, 2007; incorporated herein by reference in its entirety]. In some embodiments, certain genes associated with endogenous silencing pathways, e.g., “Silencing Genes” can be silenced using gene editing technologies and/or endogenous silencing pathways.

-Exemplary E. aureum RDR6 genomic sequence ()
SEQ ID NO: 96
CTGTGACAACAAAATGGGTTCCCTGGGGTCTGACAAGGACAAGAAGGACTTGATTGTCACTCAA
GTTGGTGTTGGTGGTTTTGGTGACAAGGTTTCAGCAAAAGAGCTAACTGACTTTCTGGAATCTA
AAGTGGGGCTAATATGGAGATGTAGACTGAAGACTTCTTGGACCCCACCAGAATCCTACCCGGA
CTTTCAAGTTGCCATTACATCTGAGACCCTAAGGACAGGTAAATATGAAAAAGTGGTGCCTCAT
GCATTTGTACACTTCGCAGTTTCTGATGGGGCCAAGAGGGCTGTCAATGCTGCTGGCAAATCTG
AGCTCATGTTGAATGGCTGCTGCCTCAAGGTAAACTCAGGGATGGACAGTGCTTTCCGGGTAAA
TCGGAGGAGAACTACAGATCCATTTAAGTTTTCTGATGTCCATGTTGAGATAGGAACTCTATGC
AGTCGGGATGAATTCTGGGTTGGTTGGGAAGGACCTAACTCTGGTGTTGATTTTGTAATTGATC
CTTTTGATGGTTGTTGTAAAATACTTTTCTCAAGGGAGGTGGTGTTCTCATTTAAAGGAAGGAA
AGAGACGGCCGTGCTCAAATGTGATGTCAAGATTGAATTCTTTGTGAGAGAGATCAATGAAATA
AGATTGTATACTGACACGTCACCATTTGTGGTACTATTACATCTTGCCTCCTCTCCTTTAGTCT
ATTATAGAACAGCAGATGATGATATATATGTCTCTGTACCATTCAATTTACTAGATGATGAAGA
CCCATGGATAAGAACAACTGACTTCACCCCCGGTGGAGCCATTGGCAGGTGTAGTTCTTATAGG
ATTTCTCTCTCCCCCCGCTATTGGGCTAAGTTGAAGAAAGCCATGAACTACATGAGGGAACGCA
GGATCATTGAACAGCAGCCTAAGCATGACCTCTTAGTCCTAAAAGAGCCTTCCTATGGATCACC
AACTTTAGATGTGTTTTTCTGCATTGAACATGCCGGTATCAGTTTCAATATTATGTTTTTGGTG
AATGTTTTGGTGCATAAAGGTATTTTCAATCAACATCAGTTGTCTGATGATTTCTTTGCATTGC
TGACAAGACAGAATGGCATTGTAAATGAGGCATCACTGCGGCATATCTGTTCATATAAGCGGCC
CATATTTGATGCTACACGAAGGCTAAAGCTTGTACAGCAATGGTTTCTGAAGAATCCTAAACTA
CTGAAAACGAGTAAGACTTCTGCAGATAATGCTGAAGTAAGGAGGTTGATTATAACGCCTACAA
AGGCATATTGTCTCCCTCCCGAGATCGAACTCTCCAATAGAGTTCTTAGAAAATACAAGGAGGT
TGCTGACAGGTTCTTGAGAGTTACTTTCATGGATGAAGGGATGCAGCAGTTGAATAACAATGTT
CTGACGTACTATTCTGCACCTATTGTTAGGGACATAACTAAGAACTCATACTCTCAGAAGACAA
CTGTGTTTAAAAGGGTGAAGAGTATTTTAACTAATGGTTTTCACTTATGTGGTCGGAAATACTC
CTTTCTTGCTTTCTCATCTAATCAATTGAGGGACAGGTCTGCATGGTTCTTTGCACAGGACAAG
GATCATAATGTCAACTCCATCAGAATTTGGATGGGTAAGTTTTCAAATAGGAACATCGCAAAAT
GTGCTGCTCGGATGGGTCAGTGTTTTTCATCTACATATGCCACAGTGAACGTTCCATCAGAAGA
GGTTGATCCTGAATTTCAAGATATTGAGAGAAATAACTATGTTTTCTCTGATGGTATTGGAAAA
CTGACGCCTGATCTTGCTACAGAAGTTGCTGAAAAATTGCAACTGGCTGATAATCCGCCTTCTG
CCTATCAAATTAGGTATGCTGGTTGCAAGGGTGTTATAGCTGTATGGCCTGGAAATGGCAATGG
AATCCGACTCTTCCTGAGGCCAAGCATGAATAAATTTGAATCACTTCACACTGTACTTGAGGTT
GTGTCATGGACCCGATTCCAACCAGGCTTCCTGAACCGTCAGATTGTAACCTTGCTTTCATCCT
TGGGTGTTGCAGATTCTGTGTTTGATATGATGCAGGATTTGATGATTTGTAAGCTAGACCAGAT
GCTTGTGGACACTGATGTGGCATTTGATGTTCTTACTACATCATGTGCTGAACATGGGAATATT
GCAGCATTAATGCTTAGTGCTGGTTTTAGACCTAAGACTGAGCCACATCTCAAAGGAATGCTCT
CTTGCATAAGGTCTGCCCAACTTGGAGACCTTTTGAGAAAGGCAAGGATCTTCATCCCCAAGGG
ACGTTGGCTGATGGGTTGCTTGGATGAACTAGGTGTACTTGAGCATGGGCAATGCTTTATCCAG
GTATCAACTCCATCATTGGAAAATTACTTCTCAAAACATGGTTCCGGGTTTTCTGAAACTAAGA
AAGTCAGACAAACAATCACCGGGACTGTTGCAATTGCAAAGAACCCTTGTCTTCATCCCGGAGA
TATCAGAATACTAGAAGCAGTTGATGTGCCTGGCCTGCATCATCTTGTTGATTGTTTAGTTTTT
CCTCAAAAGGGTGATAGGCCTCATACAAATGAGGCATCGGGAAGTGACCTGGATGGGGATCTGT
ATTTTGTTACCTGGGATGAGAATCTCTTACCCCCAGGTAAGAAGAGCTGGCCACCAATGGATTA
TGCAGCTCCAGAAGTCAAGCAATTGCCTCGCCCAGTTACTCACACA
-Exemplary E. aureum RDR6 amino acid sequence
SEQ ID NO: 97
MCWWTMGTNQWQQLWACKQQIEASLDADQARVASGQPRTVMTVFRKLLYCDNKMGSLGSDKDKK
DLIVTQVGVGGFGDKVSAKELTDFLESKVGLIWRCRLKTSWTPPESYPDFQVAITSETLRTGKY
EKVVPHAFVHFAVSDGAKRAVNAAGKSELMLNGCCLKVNSGMDSAFRVNRRRTTDPFKFSDVHV
EIGTLCSRDEFWVGWEGPNSGVDFVIDPFDGCCKILFSREVVFSFKGRKETAVLKCDVKIEFFV
REINEIRLYTDTSPFVVLLHLASSPLVYYRTADDDIYVSVPFNLLDDEDPWIRTTDFTPGGAIG
RCSSYRISLSPRYWAKLKKAMNYMRERRIIEQQPKHDLLVLKEPSYGSPTLDVFFCIEHAGISF
NIMFLVNVLVHKGIFNQHQLSDDFFALLTRQNGIVNEASLRHICSYKRPIFDATRRLKLVQQWE
LKNPKLLKTSKTSADNAEVRRLIITPTKAYCLPPEIELSNRVLRKYKEVADRFLRVTFMDEGMQ
QLNNNVLTYYSAPIVRDITKNSYSQKTTVFKRVKSILINGFHLCGRKYSFLAFSSNQLRDRSAW
FFAQDKDHNVNSIRIWMGKFSNRNIAKCAARMGQCFSSTYATVNVPSEEVDPEFQDIERNNYVF
SDGIGKLTPDLATEVAEKLQLADNPPSAYQIRYAGCKGVIAVWPGNGNGIRLFLRPSMNKFESL
HTVLEVVSWTRFQPGFLNRQIVTLLSSLGVADSVFDMMQDLMICKLDQMLVDTDVAFDVLTTSC
AEHGNIAALMLSAGFRPKTEPHLKGMLSCIRSAQLGDLLRKARIFIPKGRWLMGCLDELGVLEH
GQCFIQVSTPSLENYFSKHGSGFSETKKVRQTITGTVAIAKNPCLHPGDIRILEAVDVPGLHHL
VDCLVFPQKGDRPHTNEASGSDLDGDLYFVTWDENLLPPGKKSWPPMDYAAPEVKQLPRPVTHT
DIIDFFTKNMVNESLGVICNGHVVHADRSEQGAMDTKCLLLAELAALAVDFPKTGKIVSMPHDL
KPKLYPDFMGKDDFLSYKSDKILGKLYRKIKDSSEEDGLTSDLSYKHEDIPYDIDLEIGGASHF
LEDAWDRKCSYDTVLNALLGQYRVNSEGEVVTGHIWSMPKFNSHDERGKLYEQKASAWYQVTYH
PQWVKKALDLREPDGDHIPPRLSFAWIPVDYLVRIKVRSRSDKGELDGNKPVDALAAYLRDRV

[0232] In some embodiments, a genome editing system targets nucleotides within a specific target site, e.g., within a specific gene. In some such embodiments, a target site is or comprises, but is not limited by, an endogenous loci known to impact: transgene expression, stomatal flux, trichome density, cuticle wax levels, metabolic pathways, or any combination of these pathways.

[0233] In some embodiments, a genome editing system comprises a nucleic acid strand that is complementary to a target site in a gene (e.g., complementary to a nucleotide sequence that is at least 85%, 90%, 91%, 92%, 93%, 94%, 95%, 96%, 97%, 98%, 99%, or 100% identical to a portion of SEQ ID NO: 96 or a characteristic portion thereof. In some embodiments, a genome editing system comprises a nucleic acid strand that is complementary to a target site in a gene (e.g., complementary to a nucleotide sequence that is at least 85%, 90%, 91%, 92%, 93%, 94%, 95%, 96%, 97%, 98%, 99%, or 100% identical to a portion of a sequence encoding a protein sequence represented by SEQ ID NO: 97 or a characteristic portion thereof. In some embodiments, a target site may be 15-30 nucleotides long, e.g., 15, 16, 17, 18, 19, 20, 21, 22, 23, 24, 25, 26, 27, 28, 29, or 30 nucleotides long, although shorter and longer target sites are also contemplated.

[0234] In some embodiments, a genome editing system comprises a nucleic acid strand that comprises a region that is perfectly complementary to at least 6, 7, 8, 9, 10, 11, 12, 13 14, 15, 16, 17, 18, 19, 20, 21, 22, 23, 24, 25, 26, 27, 28, 29, or 30 consecutive nucleotides of a gene. In some embodiments a genome editing system is an RNA-guided nuclease system. In some embodiments, such an RNA-guided nuclease system is capable of inhibiting expression of one or more target genes and/or their associated mRNA, e.g., EPF1, EPF2, RDR6 listed under NCBI RefSeq accession numbers: NM_127657.4, NM_103147.3, and NM_001339423.1 respectively.

### RNA-Guided Nucleases

[0235] RNA-guided nucleases according to the present disclosure include, but are not limited to, naturally-occurring Class 2 CRISPR nucleases such as Cas9, and Cpf1, as well as other nucleases derived or obtained therefrom. In functional terms, RNA-guided nucleases are defined as those nucleases that: (a) interact with (e.g., complex with) a gRNA; and (b) together with gRNA, associate with, and optionally cleave or modify, a target region of a DNA that includes (i) a sequence complementary to a targeting domain of a gRNA and, optionally, (ii) an additional sequence referred to as a “protospacer adjacent motif,” or “PAM,” which is described in greater detail herein and within the public literature.

[0236] Naturally occurring CRISPR systems are organized evolutionarily into two classes and five types (Makarova et al. Nat Rev Microbiol. 2011 June; 9 (6): 467-477 (“Makarova”), which is incorporated in its entirety herein by reference), and while genome editing systems of the present disclosure may adapt components of any type or class of naturally occurring CRISPR system, embodiments presented herein are generally adapted from Class 2, and type II or V CRISPR systems. Class 2 systems, which encompass types II and V, are characterized by relatively large, multidomain CRISPR proteins (e.g., Cas9 or Cpf1) and one or more gRNAs (e.g., a crRNA and, optionally, a tracrRNA) that form ribonucleoprotein (RNP) complexes that associate with (i.e., target) and cleave specific loci complementary to a targeting (or spacer) sequence of a crRNA. Genome editing systems according to the present disclosure similarly target and edit cellular DNA sequences, but differ significantly from CRISPR systems occurring in nature. For example, unimolecular gRNAs described herein do not occur in nature, and both gRNAs and CRISPR nucleases according to this disclosure may incorporate any number of non-naturally occurring modifications.

[0237] As described herein, it should be noted that a genome editing systems of the present disclosure can be targeted to a single specific nucleotide sequence, or may be targeted to—and capable of editing in parallel-two or more specific nucleotide sequences through use of two or more gRNAs. In some embodiments, use of multiple gRNAs is referred to as “multiplexing.” As described herein, multiplexing can be employed, for example, to target multiple, unrelated target sequences of interest, or to form multiple SSBs or DSBs within a single target domain and, in some cases, to generate specific edits within such target domain. For example, International Patent Publication No. WO 2015/138510 by Maeder et al., which is incorporated in its entirety herein by reference; (“Maeder”) describes a genome editing system for correcting a point mutation (C.2991+1655A to G) in human CEP290 that results in t creation of a cryptic splice site, which in turn reduces or eliminates function of the gene. That genome editing system of Maeder utilizes two gRNAs targeted to sequences on either side of (i.e., flanking) the point mutation, and forms DSBs that flank the mutation. This, in turn, promotes deletion of the intervening sequence, including the mutation, thereby eliminating the cryptic splice site and restoring normal gene function.

[0238] As another example, WO 2016/073990 by Cotta-Ramusino, et al. (“Cotta-Ramusino”), which is incorporated in its entirety herein by reference. Cotta-Ramusino describes a genome editing system that utilizes two gRNAs in combination with a Cas9 nickase (a Cas9 that makes a single strand nick such as S. pyogenes D10A), an arrangement termed a “dual-nickase system.” The dual-nickase system of Cotta-Ramusino is configured to make two nicks on opposite strands of a sequence of interest that are offset by one or more nucleotides, which nicks combine to create a double strand break having an overhang (5′ in the case of Cotta-Ramusino, though 3′ overhangs are also possible). The overhang, in turn, can facilitate homology directed repair events in some circumstances. And, as another example, WO 2015/070083 by Palestrant et al., which is incorporated in its entirety herein by reference; (“Palestrant”) describes a gRNA targeted to a nucleotide sequence encoding Cas9 (referred to as a “governing RNA”), which can be included in a genome editing system comprising one or more additional gRNAs to permit transient expression of a Cas9 that might otherwise be constitutively expressed, for example in some virally transduced cells. These multiplexing applications are intended to be exemplary, rather than limiting, and the skilled artisan will appreciate that other applications of multiplexing are generally compatible with the genome editing systems described here.

[0239] Genome editing systems can, in some instances, form double strand breaks that are repaired by cellular DNA double-strand break mechanisms such as NHEJ or HDR. These mechanisms are described throughout the literature, for example by Davis & Maizels, PNAS, 111 (10): E924-932, Mar. 11, 2014, which is incorporated in its entirety herein by reference (“Davis”) (describing Alt-HDR); Frit et al. DNA Repair 17 (2014) 81-97, which is incorporated in its entirety herein by reference (“Frit”) (describing Alt-NHEJ); and Iyama and Wilson III, DNA Repair (Amst.) 2013-Aug; 12 (8): 620-636, which is incorporated in its entirety herein by reference (“Iyama”) (describing canonical HDR and NHEJ pathways generally).

[0240] Where genome editing systems operate by forming DSBs, such systems optionally include one or more components that promote or facilitate a particular mode of double-strand break repair or a particular repair outcome. For instance, Cotta-Ramusino also describes genome editing systems in which a single stranded oligonucleotide “donor template” is added; a donor template is incorporated into a target region of cellular DNA that is cleaved by a genome editing system, and can result in a change in a target sequence.

[0241] In some embodiments, genome editing systems modify a target sequence, or modify expression of a gene in or near a target sequence, without causing single- or double-strand breaks. For example, a genome editing system may include a CRISPR protein fused to a functional domain that acts on DNA, thereby modifying a target sequence or its expression. As one example, a CRISPR protein can be connected to (e.g., fused to) a cytidine deaminase functional domain, and may operate by generating targeted C-to-A substitutions. Exemplary nuclease/deaminase fusions are described in Komor et al. Nature 533, 420-424 (19 May 2016) (“Komor”), which is incorporated in its entirety herein by reference. In some embodiments, a genome editing system may utilize a cleavage-inactivated (i.e., a “dead”) nuclease, such as a dead Cas9 (dCas9), and may operate by forming stable complexes on one or more targeted regions of cellular DNA, thereby interfering with functions involving a targeted region(s) including, without limitation, mRNA transcription, chromatin remodeling, etc. In some embodiments, a genome editing system may be self-inactivating, as described by Li et al. “A Self-Deleting AAV-CRISPR System for In Vivo Editing” Mol Ther Methods Clin Dev. 2019 Mar. 15; 12:111-122; published online (2018 Dec. 6), the contents of which are hereby incorporated by reference in its entirety.

[0242] As the following discussion will illustrate, RNA-guided nucleases can be defined, in broad terms, by their PAM specificity and cleavage activity, even though variations may exist between individual RNA-guided nucleases that share the same PAM specificity or cleavage activity. Skilled artisans will appreciate that some aspects of the present disclosure relate to systems, methods and compositions that can be implemented using any suitable RNA-guided nuclease having a certain PAM specificity and/or cleavage activity. For this reason, unless otherwise specified, the term RNA-guided nuclease should be understood as a generic term, and not limited to any particular type (e.g., Cas9 vs. Cpf1), species (e.g., S. pyogenes vs. S. aureus, etc.) or variation (e.g., full-length vs. truncated or split; naturally-occurring PAM specificity vs. engineered PAM specificity, etc.) of RNA-guided nuclease. In some embodiments, a CRISPR/Cas is derived from a type II CRISPR/Cas system. In some embodiments, a CRISPR/Cas system is derived from a Cas9 protein. A Cas9 protein can be from Streptococcus pyogenes, Streptococcus thermophilus, Staphylococcus aureus, Campylobacter jejuni, or other species. In some embodiments, Cas9 can include: spCas9, Cpf1, CasY, CasX, saCas9, or CjCas9.

[0243] Administering bacterial Cas9 in plants presents silencing concerns. Therefore, in some embodiments, a codon-optimized CRISPR system is provided to reduce potential silencing.

[0244] A PAM sequence takes its name from its sequential relationship to a “protospacer” sequence that is complementary to gRNA targeting domains (or “spacers”). Together with protospacer sequences, PAM sequences define target regions or sequences for specific RNA-guided nuclease/gRNA combinations. Various RNA-guided nucleases may require different sequential relationships between PAMs and protospacers. In general, Cas9s recognize PAM sequences that are 3′ of a protospacer. Cpf1, on the other hand, generally recognizes PAM sequences that are 5′ of a protospacer.

[0245] In addition to recognizing specific sequential orientations of PAMs and protospacers, RNA-guided nucleases can also recognize specific PAM sequences. S. aureus Cas9, for instance, recognizes a PAM sequence of NNGRRT or NNGRRV, wherein the N residues are immediately 3′ of the region recognized by the gRNA targeting domain. S. pyogenes Cas9 recognizes NGG PAM sequences. And F. novicida Cpf1 recognizes a TTN PAM sequence. PAM sequences have been identified for a variety of RNA-guided nucleases, and a strategy for identifying novel PAM sequences has been described by Shmakov et al., 2015, Molecular Cell 60, 385-397, Nov. 5, 2015. It should also be noted that engineered RNA-guided nucleases can have PAM specificities that differ from PAM specificities of reference molecules (for instance, in the case of an engineered RNA-guided nuclease, a reference molecule may be a naturally occurring variant from which an RNA-guided nuclease is derived, or a naturally occurring variant having the greatest amino acid sequence homology to an engineered RNA-guided nuclease).

[0246] In addition to their PAM specificity, RNA-guided nucleases can be characterized by their DNA cleavage activity: naturally-occurring RNA-guided nucleases typically form DSBs in target nucleic acids, but engineered variants have been produced that generate only SSBs (discussed above) Ran & Hsu, et al., Cell 154 (6), 1380-1389 Sep. 12, 2013 (“Ran”)), or that that do not cut at all.

### CRISPR Fusion Proteins

[0247] As described herein, in some embodiments, a CRISPR nuclease is part of a fusion protein comprising one or more heterologous protein domains (e.g., about or more than about 1, 2, 3, 4, 5, 6, 7, 8, 9, 10, or more domains in addition to a CRISPR nuclease). A CRISPR nuclease fusion protein may comprise any additional protein sequence, and optionally a linker sequence between any two domains. Examples of protein domains that may be fused to a CRISPR nuclease include, without limitation, epitope tags, reporter gene sequences, and protein domains having one or more of the following activities: methylase activity, demethylase activity, transcription activation activity, deamination activity, transcription repression activity, transcription release factor activity, histone modification activity, RNA cleavage activity and nucleic acid binding activity. Additional domains that may form part of a fusion protein comprising a CRISPR nuclease are described in US20110059502, incorporated herein by reference. In some embodiments, a tagged CRISPR nuclease is used to identify a location of a target sequence. In some embodiments, a CRISPR nuclease that is part of a fusion protein has been engineered to produce only SSBs as described herein. In some embodiments, a CRISPR nuclease that is part of a fusion protein has been engineered to not cut at all as described herein.

### CRISPR Variants

[0248] In general, RNA-guided nucleases comprise at least one RNA recognition and/or RNA binding domain. RNA recognition and/or RNA binding domains interact with a guiding RNA. CRISPR/Cas proteins can also comprise nuclease domains (i.e., DNase or RNase domains), DNA binding domains, helicase domains, RNAse domains, protein-protein interaction domains, dimerization domains, as well as other domains. RNA-guided nucleases can be modified to increase nucleic acid binding affinity and/or specificity, alter an enzymatic activity, and/or change another property of a protein. In some embodiments, a CRISPR/Cas-like protein of a fusion protein can be derived from a wild type Cas9 protein or fragment thereof. In other embodiments, a CRISPR/Cas can be derived from modified Cas9 protein. For example, an amino acid sequence of a Cas9 protein can be modified to alter one or more properties (e.g., nuclease activity, affinity, stability, and so forth) of a protein. Alternatively, domains of a Cas9 protein not involved in RNA-guided cleavage can be eliminated from a protein such that a modified Cas9 protein is smaller than a wild type Cas9 protein. In general, a Cas9 protein comprises at least two nuclease (i.e., DNase) domains. For example, a Cas9 protein can comprise a RuvC-like nuclease domain and a HNH-like nuclease domain. RuvC and HNH domains work together to cut single strands to make a double-stranded break in DNA (Jinek et al., 2012, Science, 337:816-821, which is incorporated in its entirety herein by reference).

[0249] In some embodiments, a Cas9-derived protein can be modified to contain only one functional nuclease domain (either a RuvC-like or a HNH-like nuclease domain). For example, a Cas9-derived protein can be modified such that one nuclease domain is deleted or mutated such that it is no longer functional (i.e., nuclease activity is absent). In some embodiments in which one nuclease domains is inactive, a Cas9-derived protein is able to introduce a nick into a double-stranded nucleic acid (such protein is termed a “nickase”), but not cleave double-stranded DNA. In any of the above-described embodiments, any or all of nuclease domains can be inactivated by one or more deletion mutations, insertion mutations, and/or substitution mutations using well-known methods, such as site-directed mutagenesis, PCR-mediated mutagenesis, and total gene synthesis, as well as other methods known in the art.

[0250] One example of a CRISPR/Cas9 system used to inhibit gene expression, CRISPRi, is described in U.S. Publication No. US2014/0068797, which is incorporated herein by reference in its entirety. CRISPRi induces permanent gene disruption that utilizes the RNA-guided Cas9 endonuclease to introduce DNA double stranded breaks which trigger error-prone repair pathways to result in frame shift mutations. A catalytically dead Cas9 lacks endonuclease activity. When coexpressed with a gRNA, a DNA recognition complex is generated that specifically interferes with transcriptional elongation, RNA polymerase binding, or transcription factor binding. This CRISPRi system efficiently represses expression of targeted genes.

Guide RNAs (gRNAs)

[0251] A gRNA sequence may be specific for any gene, such as a gene that would affect (e.g., improve, attenuate, inhibit) functions related to phytoremediation. In some embodiments, a gene encodes an ion channel subunit. In some embodiments, a gene encodes an enzymatic subunit. In some embodiments, a gene encodes a structural protein subunit. In some embodiments, a gRNA sequence includes an RNA sequence, a DNA sequence, a combination thereof (a RNA-DNA combination sequence), or a sequence with synthetic nucleotides. A gRNA sequence can be a single molecule or a double molecule. In one embodiment, a gRNA sequence comprises a single guide RNA (sgRNA).

[0252] In some embodiments, a gRNA sequence is specific for a gene and targets that gene for Cas endonuclease-induced double strand breaks. A sequence of a gRNA may be within a loci of the gene. In one embodiment, a gRNA sequence is at least 10, 11, 12, 13, 14, 15, 16, 17, 18, 19, 20, 21, 22, 23, 24, 25, 26, 27, 30, 31, 32, 33, 34, 35, 36, 37, 38, 39, 40 or more nucleotides in length. In some embodiments, a gRNA sequence is from about 18 to about 22 nucleotides in length.

[0253] As described herein, in some embodiments in the context of formation of a CRISPR complex, “target sequence” refers to a sequence to which a guide sequence is designed to have some complementarity, where hybridization between a target sequence and a guide sequence promotes formation of a CRISPR complex. Full complementarity is not necessarily required, provided there is sufficient complementarity to cause hybridization and promote formation of a CRISPR complex. A target sequence may comprise any polynucleotide, such as DNA or RNA polynucleotides. In some embodiments, a target sequence is located in the nucleus or cytoplasm of a cell. In other embodiments, a target sequence may be within an organelle of a eukaryotic cell, for example, mitochondrion or nucleus. Typically, in the context of an endogenous CRISPR system, formation of a CRISPR complex (comprising a guide sequence hybridized to a target sequence and complexed with one or more Cas proteins) results in cleavage of one or both strands in or near (e.g., within about 1, 2, 3, 4, 5, 6, 7, 8, 9, 10, 20, 50 or more base pairs) a target sequence. As with a target sequence, it is believed that complete complementarity is not needed, provided this is sufficient to be functional. In some embodiments, a tracr sequence has at least 50%, 60%, 70%, 80%, 90%, 95% or 99% of sequence complementarity along the length of a tracr mate sequence when optimally aligned.

gRNA Design

[0254] Methods for selection and validation of target sequences as well as off-target analyses have been described previously, e.g., in Mali; Hsu; Fu et al., 2014 Nat biotechnol 32 (3): 279-84, Heigwer et al., 2014 Nat methods 11 (2): 122-3; Bae et al. (2014) Bioinformatics 30 (10): 1473-5; and Xiao A et al. (2014) Bioinformatics 30 (8): 1180-1182, each of which is incorporated in its entirety herein by reference. As a non-limiting example, gRNA design may involve use of a software tool to optimize choice of potential target sequences corresponding to a user's target sequence, e.g., to minimize total off-target activity across a genome. While off-target activity is not limited to cleavage, cleavage efficiency at each off-target sequence can be predicted, e.g., using an experimentally-derived weighting scheme. These and other guide selection methods are described in detail in Maeder and Cotta-Ramusino.

[0255] For example, in certain embodiments, methods for selection and validation of target sequences in plants as well as off-target analyses can be performed using CRISPR-P, CRISPR-PLANT, and/or CRISPR-GE (Liu et al., CRISPR-P 2.0: An improved CRISPR-Cas9 Tool for Genome Editing in Plants. Mol Plant. 2017 Mar. 6; 10 (3): 530-532; Xie et al., Genome-wide prediction of highly specific guide RNA spacers for CRISPR-Cas9-mediated genome editing in model plants and major crops. Mol Plant. 2014 May 7; (5): 923-6; and Xie et al., CRISPR-GE: A Convenient Software Toolkit for CRISPR-Based Genome Editing. Mol Plant. 2017 Sep. 12; 10 (9): 1246-1249; each of which is incorporated in its entirety herein by reference).

gRNA Modifications

[0256] Activity, stability, or other characteristics of gRNAs can be altered through incorporation of certain modifications. As one example, transiently expressed or delivered nucleic acids can be prone to degradation by, e.g., cellular nucleases. Accordingly, gRNAs described herein can contain one or more modified nucleosides or nucleotides that can introduce stability toward nucleases. While not wishing to be bound by theory, it is also believed that certain modified gRNAs described herein can potentially exhibit a reduced silencing response when introduced into plant cells. Those of skill in the art will be aware of certain cellular responses commonly observed in cells, e.g., plant cells, in response to exogenous nucleic acids, particularly those of viral or bacterial origin. Such responses, may potentially be reduced or eliminated altogether by modifications presented herein.

[0257] Certain exemplary modifications discussed in this section can be included at any position within a gRNA sequence including, without limitation at or near its 5′ end (e.g., within 1-10, 1-5, or 1-2 nucleotides of a 5′ end) and/or at or near its 3′ end (e.g., within 1-10, 1-5, or 1-2 nucleotides of a 3′ end). In some cases, modifications are positioned within functional motifs, such as a repeat-anti-repeat duplex of a Cas9 gRNA, a stem loop structure of a Cas9 or Cpf1 gRNA, and/or a targeting domain of a gRNA. Others types of modified nucleobases are described herein.

[0258] The present disclosure provides technologies (e.g., comprising compositions) that may, in some embodiments, reduce, suppress or otherwise decrease (“knock down”) expression of one or more gene products. For example, in some embodiments, technologies of the present disclosure may achieve knockdown of a EPF1, EPF2, and/or RDR6 gene product (e.g., a gene, mRNA, protein, etc.).

[0259] In some embodiments, knockdown of a gene product (e.g., a gene, mRNA, protein, etc.) is achieved using one or more techniques to inhibit one or more gene products or processes by which gene products are produced. For example, in some embodiments, the present disclosure provides technologies that comprise compositions that are or comprise inhibitory nucleic acid molecules to knock down expression of a gene product.

[0260] In some embodiments, an inhibitory nucleic acid molecule targets nucleotides within a EPF1, EPF2, and/or RDR6 gene product. In some embodiments, an inhibitory nucleic acid molecule comprises a nucleic acid strand that is complementary to a target site of a gene product, e.g., EPF1, EPF2, and/or RDR6 mRNA (e.g., complementary to a nucleotide sequence that is at least 85%, 90%, 91%, 92%, 93%, 94%, 95%, 96%, 97%, 98%, 99%, or 100% identical to a portion of such a gene). In some embodiments, a target site may be 15-30 nucleotides long, e.g., 15, 16, 17, 18, 19, 20, 21, 22, 23, 24, 25, 26, 27, 28, 29, or 30 nucleotides long, although shorter and longer target sites are also contemplated.

[0261] In some embodiments, an inhibitory nucleic acid molecule comprises a nucleic acid strand that comprises a region that is perfectly complementary to at least 6, 7, 8, 9, 10, 11, 12, 13 14, 15, 16, 17, 18, 19, 20, 21, 22, 23, 24, 25, 26, 27, 28, 29, or 30 consecutive nucleotides of a gene of interest or characteristic portions thereof).

[0262] In some embodiments an inhibitory nucleic acid molecule is capable of inhibiting expression of a gene product of one or more plant species, e.g., a. In some embodiments, an inhibitory RNA molecule or Genome editing system is complementary to a target portion that is identical in multiple plant species. In some embodiments, an inhibitory RNA molecule is complementary to a target site of one plant species that varies by 1, 2, 3, 4, 5, 6, 7, 8, 9, or 10 nucleotides from another plant species.

### Inhibitory Nucleic Acid Molecules

[0263] RNA interference (RNAi) is a process of sequence-specific post-transcriptional gene silencing by which, e.g., double stranded RNA (dsRNA) homologous to a target locus can specifically inactivate gene function (Hammond et al., Nature Genet. 2001; 2:110-119; Sharp, Genes Dev. 1999; 13:139-141). In some embodiments, dsRNA-induced gene silencing can be mediated by short double-stranded small interfering RNAs (siRNAs) generated from longer dsRNAs by ribonuclease III cleavage (Bernstein et al., Nature 2001; 409:363-366 and Elbashir et al., Genes Dev. 2001; 15:188-200). Without being bound by any particular theory, RNAi-mediated gene silencing is thought to occur via sequence-specific RNA degradation and/or sequestration, where sequence specificity is determined by interaction of a siRNA with its complementary sequence within a target RNA (see, e.g., Tuschl, Chem. Biochem. 2001; 2:239-245). In some embodiments, RNAi can involve use of, e.g., siRNAs (Elbashir, et al., Nature 2001; 411:494-498, which is incorporated in its entirety herein by reference) or short hairpin RNAs (shRNAs) bearing a fold back stem-loop structure (Paddison et al., Genes Dev. 2002; 16:948-958; Sui et al., Proc. Natl. Acad. Sci. USA 2002; 99:5515-5520; Brummelkamp et al., Science 2002; 296:550-553; Paul et al., Nature Biotechnol. 2002; 20:505-508, each of which is incorporated in its entirety herein by reference).

[0264] In some embodiments an inhibitory nucleic acid is one or more of a short interfering RNA (siRNA), a short hairpin RNA (shRNA), an antisense oligonucleotide, or a ribozyme. In some embodiments, knockdown of a gene of interests expression is achieved via inhibitory nucleic acids that target a gene of interest sequence as described herein. In some such embodiments, a targeted sequence may be a wild-type and/or variant gene sequence.

[0265] In some embodiments, an inhibitory nucleic acid of the present disclosure may be used to decrease expression of a gene product. In some such embodiments, a vector encodes an inhibitory nucleic acid that may, in some embodiments, decrease expression of a gene product, e.g., in a plant cell (e.g., a leaf cell, petiole cell, vasculature cell, stem cell, and/or root cell). In some embodiments, after an inhibitory nucleic acid is used to decrease expression of a gene product, another (i.e., non-inhibitory) nucleic acid molecule may be used to express a functional protein of interest.

siRNA or shRNA

[0266] In some embodiments, the present disclosure provides an inhibitory nucleic acid, e.g., a chemically-modified siRNAs or a vector-driven expression of short hairpin RNA (shRNA) that are then cleaved to siRNA, e.g., within a cell. Accordingly, one of skill in the art will understand that, for purposes of sequences, an shRNA sequence is interchangeable with an siRNA sequence and that where the disclosure refers to an siRNA, an shRNA sequence may be used since the shRNA will be cleaved into siRNA. For example, in some embodiments, an inhibitory nucleic acid can be a dsRNA (e.g., siRNA) including 16-30 nucleotides, e.g., 16, 17, 18, 19, 20, 21, 22, 23, 24, 25, 26, 27, 28, 29, or 30 nucleotides in each strand, where one strand is substantially identical, e.g., at least 80% (or more, e.g., 85%, 90%, 95%, or 100%) identical, e.g., having 3, 2, 1, or 0 mismatched nucleotide(s), to a target region in a gene, and the other strand is complementary to the first strand. In some embodiments, dsRNA molecules can be designed using methods known in the art, e.g., Dharmacon.com (see, siDESIGN CENTER) or “The siRNA User Guide,” available on the Internet at mpibpc.gwdg.de/abteilungen/100/105/sirna.html website which is incorporated in its entirety herein by reference. Without being bound by any particular theory, the present disclosure contemplates that siRNA or shRNAs are more “endogenous” (e.g., no foreign proteins) in a way that may be more recognizable to a cell compared to other available techniques that will be known to those of skill in the art. Accordingly, in some embodiments, siRNA or shRNA have lower inhibitory silencing potential and/or have less risk of off-target DNA interaction as compared to other techniques known to those of skill in the art.

[0267] In some embodiments, siRNAs of the present disclosure are double stranded nucleic acid duplexes (of, e.g., 15, 16, 17, 18, 19, 20, 21, 22, 23, 24, 25, 26, or 27 base pairs) comprising annealed complementary single stranded nucleic acid molecules. In some embodiments, siRNAs are short dsRNAs comprising annealed complementary single strand RNAs. In some embodiments, siRNAs comprise an annealed RNA: DNA duplex, wherein the sense strand of a duplex is a DNA molecule and the antisense strand of the same duplex is a RNA molecule. In some embodiments, duplexed siRNAs comprise a 2 or 3 nucleotide 3′ overhang on each strand of a duplex. In some embodiments, siRNAs comprise 5′-phosphate and 3′-hydroxyl groups.

[0268] In some embodiments, a siRNA molecule of the present disclosure includes one or more natural nucleobase and/or one or more modified nucleobases derived from a natural nucleobase. Examples include, but are not limited to, uracil, thymine, adenine, cytosine, and guanine having their respective amino groups protected by acyl protecting groups, 2-fluorouracil, 2-fluorocytosine, 5-bromouracil, 5-iodouracil, 2,6-diaminopurine, azacytosine, pyrimidine analogs such as pseudoisocytosine and pseudouracil and other modified nucleobases such as 8-substituted purines, xanthine, or hypoxanthine (the latter two being natural degradation products). Exemplary modified nucleobases are disclosed in Chiu and Rana, R N A, 2003, 9, 1034-1048, Limbach et al. Nucleic Acids Research, 1994, 22, 2183-2196 and Revankar and Rao, Comprehensive Natural Products Chemistry, vol. 7, 313, each of which is incorporated in its entirety herein by reference.

[0269] Modified nucleobases also include expanded-size nucleobases in which one or more aryl rings, such as phenyl rings, have been added. Nucleic base replacements described in the Glen Research catalog (available on the world wide web at glenresearch.com); Krueger A T et al., Acc. Chem. Res., 2007, 40, 141-150; Kool, ET, Acc. Chem. Res., 2002, 35, 936-943; Benner S. A., et al., Nat. Rev. Genet., 2005, 6, 553-543; Romesberg, F. E., et al., Curr. Opin. Chem. Biol., 2003, 7, 723-733; Hirao, I., Curr. Opin. Chem. Biol., 2006, 10, 622-627, each of which is incorporated in its entirety herein by reference, are contemplated as useful for siRNA molecules described herein. In some embodiments, modified nucleobases also encompass structures that are not considered nucleobases but are other moieties such as, but not limited to, corrin- or porphyrin-derived rings. Porphyrin-derived base replacements have been described in Morales-Rojas, H and Kool, ET, Org. Lett., 2002, 4, 4377-4380, which is incorporated in its entirety herein by reference.

[0270] In some embodiments, modified nucleobases are of any one of the following structures, optionally substituted:

[chemical structure]

[0271] In some embodiments, a modified nucleobase is fluorescent. Exemplary such fluorescent modified nucleobases include phenanthrene, pyrene, stillbene, isoxanthine, isozanthopterin, terphenyl, terthiophene, benzoterthiophene, coumarin, lumazine, tethered stillbene, benzo-uracil, and naphtho-uracil.

[0272] In some embodiments, a modified nucleobase is unsubstituted. In some embodiments, a modified nucleobase is substituted. In some embodiments, a modified nucleobase is substituted such that it contains, e.g., heteroatoms, alkyl groups, or linking moieties connected to fluorescent moieties, biotin or avidin moieties, or other protein or peptides. In some embodiments, a modified nucleobase is a “universal base” that is not a nucleobase in the most classical sense, but that functions similarly to a nucleobase. One representative example of such a universal base is 3-nitropyrrole.

[0273] In some embodiments, siRNA molecules described herein include nucleosides that incorporate modified nucleobases and/or nucleobases covalently bound to modified sugars. Some examples of nucleosides that incorporate modified nucleobases include 4-acetylcytidine; 5-(carboxyhydroxylmethyl) uridine; 2′-O-methylcytidine; 5-carboxymethylaminomethyl-2-thiouridine; 5-carboxymethylaminomethyluridine; dihydrouridine; 2′-O-methylpseudouridine; beta, D-galactosylqueosine; 2′-O-methylguanosine; N6-isopentenyladenosine; 1-methyladenosine; 1-methylpseudouridine; 1-methylguanosine; 1-methylinosine; 2,2-dimethylguanosine; 2-methyladenosine; 2-methylguanosine; N7-methylguanosine; 3-methyl-cytidine; 5-methylcytidine; 5-hydroxymethylcytidine; 5-formylcytosine; 5-carboxylcytosine; N°-methyladenosine; 7-methylguanosine; 5-methylaminoethyluridine; 5-methoxyaminomethyl-2-thiouridine; beta, D-mannosylqueosine; 5-methoxycarbonylmethyluridine; 5-methoxyuridine; 2-methylthio-N6-isopentenyladenosine; N-((9-beta, D-ribofuranosyl-2-methylthiopurine-6-yl) carbamoyl) threonine; N-((9-beta, D-ribofuranosylpurine-6-yl)-N-methylcarbamoyl) threonine; uridine-5-oxyacetic acid methylester; uridine-5-oxyacetic acid (v); pseudouridine; queosine; 2-thiocytidine; 5-methyl-2-thiouridine; 2-thiouridine; 4-thiouridine; 5-methyluridine; 2′-O-methyl-5-methyluridine; and 2′-O-methyluridine.

[0274] In some embodiments, nucleosides include 6′-modified bicyclic nucleoside analogs that have either (R) or(S)-chirality at the 6′-position and include the analogs described in U.S. Pat. No. 7,399,845, which is incorporated in its entirety herein by reference. In other embodiments, nucleosides include 5′-modified bicyclic nucleoside analogs that have either (R) or (S)-chirality at the 5′-position and include the analogs described in U.S. Publ. No. 20070287831, which is incorporated in its entirety herein by reference. In some embodiments, a nucleobase or modified nucleobase is 5-bromouracil, 5-iodouracil, or 2,6-diaminopurine. In some embodiments, a nucleobase or modified nucleobase is modified by substitution with a fluorescent moiety.

[0275] Methods of preparing modified nucleobases are described in, e.g., U.S. Pat. Nos. 3,687,808; 4,845,205; 5,130,30; 5,134,066; 5,175,273; 5,367,066; 5,432,272; 5,457,187; 5,457,191; 5,459,255; 5,484,908; 5,502,177; 5,525,711; 5,552,540; 5,587,469; 5,594,121, 5,596,091; 5,614,617; 5,681,941; 5,750,692; 6,015,886; 6,147,200; 6,166,197; 6,222,025; 6,235,887; 6,380,368; 6,528,640; 6,639,062; 6,617,438; 7,045,610; 7,427,672; and 7,495,088, each of which is incorporated in its entirety herein by reference.

[0276] In some embodiments, a siRNA molecule described herein includes one or more modified nucleotides wherein a phosphate group or linkage phosphorus in its nucleotides are linked to various positions of a sugar or modified sugar. As non-limiting examples, a phosphate group or linkage phosphorus can be linked to a 2′, 3′, 4′ or 5′ hydroxyl moiety of a sugar or modified sugar. Nucleotides that incorporate modified nucleobases as described herein are also contemplated in this context.

[0277] Other modified sugars can also be incorporated within a siRNA molecule. In some embodiments, a modified sugar contains one or more substituents at a 2′ position including one of the following: —F; —CF₃, —CN, —N₃, —NO, —NO₂, —OR′, —SR′, or —N(R′)₂, wherein each R′ is independently as defined above and described herein; —O—(C₁-C₁₀ alkyl), —S—(C₁-C₁₀ alkyl), —NH—(C₁-C₁₀ alkyl), or —N(C₁-C₁₀ alkyl)₂; —O—(C₂-C₁₀ alkenyl), —S—(C₂-C₁₀ alkenyl), —NH—(C₂-C₁₀ alkenyl), or —N(C₂-C₁₀ alkenyl)₂; —O—(C₂-C₁₀ alkynyl), —S—(C₂-C₁₀ alkynyl), —NH—(C₂-C₁₀ alkynyl), or —N(C₂-C₁₀ alkynyl)₂; or —O—(C₁-C₁₀ alkylene)-O—(C₁-C₁₀ alkyl), —O—(C₁-C₁₀ alkylene)-NH—(C₁-C₁₀ alkyl) or —O—(C₁-C₁₀ alkylene)-NH(C₁-C₁₀ alkyl)₂, —NH—(C₁-C₁₀ alkylene)-O—(C₁-C₁₀ alkyl), or —N(C₁-C₁₀ alkyl)-(C₁-C₁₀ alkylene)-O—(C₁-C₁₀ alkyl), wherein the alkyl, alkylene, alkenyl and alkynyl may be substituted or unsubstituted. Examples of substituents include, and are not limited to, —O(CH₂)ₙOCH₃, and —O(CH₂)ₙNH₂, wherein n is from 1 to about 10, MOE, DMAOE, DMAEOE. Also contemplated herein are modified sugars described in WO 2001/088198; and Martin et al., Helv. Chim. Acta, 1995, 78, 486-504, each of which is incorporated in its entirety herein by reference. In some embodiments, a modified sugar comprises one or more groups selected from a substituted silyl group, an RNA cleaving group, a reporter group, a fluorescent label, an intercalator, a group for improving pharmacokinetic properties of a nucleic acid, a group for improving pharmacodynamic properties of a nucleic acid, or other substituents having similar properties. In some embodiments, modifications are made at one or more of a 2′, 3′, 4′, 5′, or 6′ positions of a sugar or modified sugar, including a 3′ position of a sugar on a 3′-terminal nucleotide or in a 5′ position of a 5′-terminal nucleotide.

[0278] In some embodiments, a 2′-OH of a ribose is replaced with a substituent including one of the following: —H, —F; —CF₃, —CN, —N₃, —NO, —NO₂, —OR′, —SR′, or —N(R′)₂, wherein each R′ is independently as defined above and described herein; —O—(C₁-C₁₀ alkyl), —S(C₁-C₁₀ alkyl), —NH—(C₁-C₁₀ alkyl), or —N(C₁-C₁₀ alkyl)₂; —O—(C₂-C₁₀ alkenyl), —S—(C₂-C₁₀ alkenyl), —NH—(C₂-C₁₀ alkenyl), or —N(C₂-C₁₀ alkenyl)₂; —O—(C₂-C₁₀ alkynyl), —S—(C₂-C₁₀ alkynyl), —NH—(C₂-C₁₀ alkynyl), or —N(C₂-C₁₀ alkynyl)₂; or —O—(C₁-C₁₀ alkylene)-O—(C₁-C₁₀ alkyl), —O—(C₁-C₁₀ alkylene)-NH—(C₁-C₁₀ alkyl) or —O—(C₁-C₁₀ alkylene)-NH(C₁-C₁₀ alkyl)₂, —NH—(C₁-C₁₀ alkylene)-O—(C₁-C₁₀ alkyl), or —N(C₁-C₁₀ alkyl)-(C₁-C₁₀ alkylene)-O—(C₁-C₁₀ alkyl), wherein an alkyl, alkylene, alkenyl and alkynyl may be substituted or unsubstituted. In some embodiments, a 2′-OH is replaced with —H (deoxyribose). In some embodiments, a 2′-OH is replaced with —F. In some embodiments, a 2′-OH is replaced with —OR′. In some embodiments, a 2′-OH is replaced with —OMe. In some embodiments, a 2′-OH is replaced with —OCH₂CH₂OMe.

[0279] Modified sugars also include locked nucleic acids (LNAs). In some embodiments, a locked nucleic acid has the structure indicated below. A locked nucleic acid of the structure below is indicated, wherein Ba represents a nucleobase or modified nucleobase as described herein, and wherein R^{2s} is —OCH₂C4′-

[chemical structure]

[0280] In some embodiments, a modified sugar is an ENA such as those described in, e.g., Seth et al., J Am Chem Soc. 2010 Oct. 27; 132 (42): 14942-14950, which is incorporated in its entirety herein by reference. In some embodiments, a modified sugar is any of those found in an XNA (xenonucleic acid), for instance, arabinose, anhydrohexitol, threose, 2′fluoroarabinose, or cyclohexene.

[0281] Modified sugars include sugar mimetics such as cyclobutyl or cyclopentyl moieties in place of the pentofuranosyl sugar (see, e.g., U.S. Pat. Nos. 4,981,957; 5,118,800; 5,319,080; and 5,359,044, each of which is incorporated in its entirety herein by reference). Some modified sugars that are contemplated include sugars in which an oxygen atom within a ribose ring is replaced by nitrogen, sulfur, selenium, or carbon. In some embodiments, a modified sugar is a modified ribose wherein an oxygen atom within a ribose ring is replaced with nitrogen, and wherein a nitrogen is optionally substituted with an alkyl group (e.g., methyl, ethyl, isopropyl, etc.).

[0282] Non-limiting examples of modified sugars include glycerol, which form glycerol nucleic acid (GNA) analogues. An exemplary GNA analogue is described in Zhang, R et al., J. Am. Chem. Soc., 2008, 130, 5846-5847, which is incorporated in its entirety herein by reference; see also Zhang L, et al., J. Am. Chem. Soc., 2005, 127, 4174-4175 and Tsai C H et al., PNAS, 2007, 14598-14603, each which is incorporated in its entirety herein by reference. Another example of a GNA derived analogue, flexible nucleic acid (FNA) based on mixed acetal aminal of formyl glycerol, is described in each of Joyce G F et al., PNAS, 1987, 84, 4398-4402 and Heuberger B D and Switzer C, J. Am. Chem. Soc., 2008, 130, 412-413, each of which is incorporated in its entirety herein by reference. Additional non-limiting examples of modified sugars include hexopyranosyl (6′ to 4′), pentopyranosyl (4′ to 2′), pentopyranosyl (4′ to 3′), or tetrofuranosyl (3′ to 2′) sugars.

[0283] Modified sugars and sugar mimetics can be prepared by methods known in the art, including, but not limited to: A. Eschenmoser, Science (1999), 284:2118; M. Bohringer et al., Helv. Chim. Acta (1992), 75:1416-1477; M. Egli et al., J. Am. Chem. Soc. (2006), 128 (33): 10847-56; A. Eschenmoser in Chemical Synthesis: Gnosis to Prognosis, C. Chatgilialoglu and V. Sniekus, Ed., (Kluwer Academic, Netherlands, 1996), p.293; K. U. Schoning et al., Science (2000), 290:1347-1351; A. Eschenmoser et al., Helv. Chim. Acta (1992), 75:218; J. Hunziker et al., Helv. Chim. Acta (1993), 76:259; G. Otting et al., Helv. Chim. Acta (1993), 76:2701; K. Groebke et al., Helv. Chim. Acta (1998), 81:375; and A. Eschenmoser, Science (1999), 284:2118. Modifications to 2′ modifications can be found in Verma, S. et al. Annu. Rev. Biochem. 1998, 67, 99-134 and all references therein, each of which is incorporated in its entirety herein by reference. Specific modifications to a ribose can be found in the following references: 2′-fluoro (Kawasaki et. al., J. Med. Chem., 1993, 36, 831-841), 2′-MOE (Martin, P. Helv. Chim. Acta 1996, 79, 1930-1938), “LNA” (Wengel, J. Acc. Chem. Res. 1999, 32, 301-310); PCT Publication No. WO2012/030683, each of which is incorporated in its entirety herein by reference.

[0284] In some embodiments, a siRNA described herein can be introduced to a target cell as an annealed duplex siRNA. In some embodiments, a siRNA described herein is introduced to a target cell as single stranded sense and antisense nucleic acid sequences that, once within a target cell, anneal to form a siRNA duplex. Alternatively, sense and antisense strands of an siRNA can be encoded by an expression vector (such as an expression vector described herein) that is introduced to a target cell. Upon expression within a target cell, transcribed sense and antisense strands can anneal to reconstitute an siRNA.

[0285] In some embodiments, an siRNA molecule as described herein can be synthesized by standard methods known in the art, e.g., by use of an automated synthesizer. Without being bound by any particular theory, RNAs produced by such methodologies tend to be highly pure and to anneal efficiently to form siRNA duplexes. In some embodiments, following chemical synthesis, single stranded RNA molecules can be deprotected, annealed to form siRNAs, and purified (e.g., by gel electrophoresis or HPLC). Alternatively, in some embodiments, standard procedures can be used for in vitro transcription of RNA from DNA templates, e.g., carrying one or more RNA polymerase promoter sequences (e.g., T7 or SP6 RNA polymerase promoter sequences). Protocols for preparation of siRNAs using T7 RNA polymerase are known in the art (see, e.g., Donze and Picard, Nucleic Acids Res. 2002; 30: e46; and Yu et al., Proc. Natl. Acad. Sci. USA 2002; 99:6047-6052, each of which is incorporated in its entirety herein by reference). In some embodiments, sense and antisense transcripts can be synthesized in two independent reactions and annealed later. In some embodiments, sense and antisense transcripts can be synthesized simultaneously in a single reaction.

[0286] In some embodiments, an siRNA molecule can also be formed within a cell by transcription of RNA from an expression vector introduced into a cell (see, e.g., Yu et al., Proc. Natl. Acad. Sci. USA 2002; 99:6047-6052, which is incorporated in its entirety herein by reference). For example, in some embodiments, an expression vector for in vivo production of siRNA molecules can include one or more siRNA encoding sequences operably linked to elements necessary for proper transcription of an siRNA encoding sequence(s), including, e.g., promoter elements and transcription termination signals. In some embodiments, preferred promoters for use in such expression vectors may include, e.g., a polymerase-II or polymerase-III promoter, (see, e.g., Wang et al., RNA; 14 (5): 903-913, 2008, which is incorporated in its entirety herein by reference), a U6 polymerase-III promoter (see, e.g., Sui et al., Proc. Natl. Acad. Sci. USA 2002; Paul et al., Nature Biotechnol. 2002; 20:505-508; and Yu et al., Proc. Natl. Acad. Sci. USA 2002; 99:6047-6052, each of which is incorporated in its entirety herein by reference). In some embodiments, an siRNA expression vector can comprise one or more vector sequences that facilitate cloning of an expression vector.

[0287] In some embodiments, an siRNA comprises a mature guide strand having a nucleotide sequence that is at least 90%, 91%, 92%, 93%, 94%, 95%, 96%, 97%, 98%, 99%, or 100% identical to a portion of a target gene. In some embodiments, a portion is 15, 16, 17, 18, 19, or 20 nucleotides long. In some embodiments, the present disclosure provides shRNA sequences, which, when introduced into a cell will be cleaved to siRNAs.

miRNA

[0288] The present disclosure provides technologies related to or comprising one or more inhibitory nucleic acid molecules such as, e.g., one or more nucleotide sequences that are, comprise, or encode, microRNAs. MicroRNAs (miRNAs) are a highly conserved class of small RNA molecules that are transcribed from DNA in genomes of plants and animals, but are not translated into protein. As is known to those in the art, plant cells express a range of noncoding RNAs of approximately 21 or 22 nucleotides termed micro RNA (miRNAs) and can regulate gene expression at a post transcriptional or translational level during plant development. miRNAs are excised from an approximately 60-500 nucleotide stem-loop primary miRNA transcripts (pri-miRNA). By substituting stem sequences of an miRNA precursor with miRNA sequence complementary to a target mRNA, a vector that expresses a novel miRNA can be used to produce siRNAs to initiate RNAi against specific mRNA targets in plant cell (see e.g., Wang et al., Frontiers in Plant Science, 2019, which is incorporated herein in its entirety by reference). In some embodiments, when expressed by DNA vectors containing polymerase II promoters, micro-RNA designed hairpins can silence gene expression.

[0289] In some embodiments, miRNAs can be synthesized and locally or systemically administered to a subject cell and/or tissue, e.g., for gene regulatory purposes. In some embodiments, miRNAs can be designed and/or synthesized as mature molecules or precursors (e.g., pri- or pre-miRNAs). In some embodiments, a pre-miRNA includes a guide strand and a passenger strand that are the same length (e.g., about 15, 16, 17, 18, 19, 20, 21, 22, 23, 24, or 25 nucleotides). In some embodiments, a pre-miRNA includes a guide strand and a passenger strand that are different lengths (e.g., one strand is about 19 nucleotides, and the other is about 21 nucleotides). In some embodiments, an miRNA can target a coding region, a 5′ untranslated region, and/or a 3′ untranslated region, of endogenous mRNA. In some embodiments, an miRNA comprises a guide strand comprising a nucleotide sequence having sufficient sequence complementary with an endogenous mRNA of a subject to hybridize with and inhibit expression of endogenous mRNA.

[0290] In some embodiments, miRNAs has advantages compared to shRNAs for inhibiting nucleic acids. For example, in some embodiments, shRNA requires a high level of expression, can clog Argonaut machinery, is not endogenous, and potentially relies upon multiple promoters. By contrast, in some embodiments, it is contemplated that miRNA is more “endogenous” than shRNA, and therefore, is expressed at more endogenous levels that may be handled more readily by the cells endogenous RNA processing machinery. That is, in some embodiments, miRNAs can be synthetic or naturally occurring and naturally-occurring miRNAs are present in cells across plant species.

### Antisense Nucleic Acid

[0291] In some embodiments, an inhibitory nucleic acid molecule may be or comprise an antisense nucleic acid molecule, e.g., nucleic acid molecules whose nucleotide sequence is complementary to all or part of a target gene. In some embodiments, an antisense nucleic acid molecule can be antisense to all or part of a non-coding region of a coding strand of a nucleotide sequence of a target gene. In some embodiments, a non-coding regions (“5′ and 3′ untranslated regions”) are 5′ and 3′ sequences that flank a coding region and are not translated into amino acids. Based upon sequences disclosed herein, one of skill in the art can choose and synthesize any of a number of appropriate antisense molecules to target a gene of interest as described herein. For example, a “gene walk” comprising a series of oligonucleotides of 15-30 nucleotides spanning a length of a nucleic acid (e.g., of a gene of interest) can be prepared, followed by testing for inhibition of expression of the target gene. Optionally, gaps of 5-10 nucleotides can be left between oligonucleotides to reduce numbers of oligonucleotides synthesized and tested.

[0292] In some embodiments, an antisense oligonucleotide can be, for example, about 5, 10, 15, 20, 25, 30, 35, 40, 45, or 50 nucleotides or more in length. One of skill in the art will recognize that an antisense oligonucleotide can be synthesized using various different chemistries.

### Ribozymes

[0293] In some embodiments, an inhibitory nucleic acid molecule may be or comprise a ribozyme. As is known to those of skill in the art, ribozymes are catalytic RNA molecules with ribonuclease activity. In some embodiments, a ribozyme may be used as a controllable promoter. In some embodiments, ribozymes are capable of cleaving a single-stranded nucleic acid, such as an mRNA, to which they have a complementary region. Thus, in some embodiments, ribozymes (e.g., hammerhead ribozymes (described in Haselhoff and Gerlach, Nature, 334:585-591, 1988, which is incorporated in its entirety herein by reference)) can be used to catalytically cleave mRNA transcripts to thereby inhibit translation of a protein encoded by a given mRNA. Methods of designing and producing ribozymes are known in the art (see, e.g., Scanlon, 1999, Therapeutic Applications of Ribozymes, Humana Press, which is incorporated in its entirety herein by reference). In some embodiments, for example, a ribozyme having specificity for a gene of interest can be designed based upon a known nucleotide sequence. For example, a derivative of a Tetrahymena L-19 IVS RNA can be constructed in which nucleotide sequence of an active site is complementary to a nucleotide sequence to be cleaved in a target gene mRNA product (Cech et al. U.S. Pat. No. 4,987,071; and Cech et al., U.S. Pat. No. 5,116,742, each of which is incorporated in its entirety herein by reference). Alternatively, an mRNA encoding a target gene product protein can be used to select a catalytic RNA having a specific ribonuclease activity from a pool of RNA molecules (See, e.g., Bartel and Szostak, Science, 261:1411-1418, 1993, which is incorporated in its entirety herein by reference).

### Enzyme Optimization

[0294] The present disclosure recognizes that in certain embodiments, technologies described herein comprising specific metabolic pathways may require optimization to facilitate effective VOC uptake and/or metabolism.

[0295] In some embodiments, technologies described herein comprising specific metabolic pathways comprise nucleotide coding sequences that have been codon optimized for their respective host organism.

[0296] In some embodiments, synthetic pathways are utilized to increase VOC uptake and/or metabolism. In some embodiments, these synthetic pathways comprise enzymes that have been optimized to catalyze their reactions at as fast a rate as biologically feasible. In some embodiments, this is done by the overexpression of proteins, and/or by altering the structure of the enzymes expressed. In some embodiments, the catalytic activity of a protein can be greatly enhanced by point mutations, deletions, rearrangements (a process often called directed mutagenesis). Furthermore, in some embodiments, the activity (or flux) of certain pathways can be increased by the fusion of the coding sequences of genes constituting that pathway.

### Directed Mutagenesis

[0297] In some embodiments, to increase the activity of a given enzyme, specific mutations are induced, typically leading to a change in its catalytic site, (e.g., the active site often considered crucial for its enzymatic reaction). In some embodiments, these mutations can be deliberately chosen through careful examination of the protein structure and activity, sometimes called evolution by rational design. Alternatively, in some embodiments, the mutations can also be random, driven through a process called directed evolution; wherein random mutations are introduced with multiple rounds of error-prone amplification of the DNA sequence. In some embodiments, such amplification of a DNA sequence may occur through a system such as error-prone polymerase chain reaction. In some embodiments, such amplification of a DNA sequence may occur through introduction of the gene into a mutagenic vector and/or organism (e.g., XL1 Red). Those skilled in the art will recognize there are multiple suitable methods for mediating error-prone DNA amplification. In some embodiments, this methodology results in a mutant library from which we can test the activity and select the most active and/or desirable variants from the pool of available mutants. This process allows the testing of many thousands of iterations in parallel, coupling the power of error-prone amplification with stringent selection to harness directed evolution and to create desired and yet difficult to predict mutant enzymes.

### Fusion and Chimeric Proteins

[0298] In some embodiments, sequences of individual genes of interest coding for enzymes of interest are optimized through the addition of heterologous protein domains, wherein domains are combined to create “fusion proteins”. In some embodiments, instead of inserting at least two genes, each with its own promoter, coding for at least two enzymes involved in the same or related pathways, a single coding sequence can be inserted. In some embodiments, that sequence comprises the first gene sequences without its stop codon, an optional linker region (e.g., a string of 10-12 codons coding for neutral amino acids), followed by the coding sequence of at least a second gene of interest, wherein the final coding sequence comprises a stop codon. In some embodiments, this method can result in a single reading frame and the expression of a single fusion protein. In some embodiments, this methodology provides certain advantages, e.g., a fusion protein comprising at least two proteins may bring their respective catalytic sites into closer physical proximity, increasing the overall reaction speed. In some embodiments, this method can be used to create fusion proteins combining 3 or more proteins (e.g., at least 3 proteins, at least 4 proteins, at least 5 proteins, at least 6 proteins), however, this may induce steric hindrance. Therefore, in some embodiments, when possible, pairs of proteins involved in the same pathway (e.g., HPS and PHI) are fused together.

Effects of Engineering on Ornamental Plants and/or Microbes
Increasing Diffusion and/or Active Transport

[0299] Among other things, the present disclosure provides compositions, methods of producing, and methods of using genetically modified plants with increased diffusion and/or active transport components.

[0300] In some embodiments, compositions as described herein may include a passive or an active bio filtering system.

[0301] In some embodiments, provided herein are compositions and methods that utilize genetically modified plants alone or in combination with a modified microbiome and/or active or non-active air flow system. In some embodiments, a composition described herein may have an optimized passive and/or active biofiltration phenotype (i.e. passive or active diffusion). In some embodiments, a composition or method described herein comprises a modified plant in combination with a non-active airflow system (e.g., a standard container, e.g., a pot). In some embodiments, compositions and methods described herein comprise a genetically modified plant and an active airflow system that increases airflow to and/or around a plant. In some embodiments, an active airflow system solves a potential problem of air stagnation, e.g., in some embodiments, compositions as described herein are placed inside a container (e.g., planting pot) that generates an airflow directed towards the composition (e.g., soil, leaves, and/or stems, e.g., plant tissue and/or microbiome comprising compositions). In some embodiments, an active airflow promotes air circulation within a room and promotes passage of pollutant particles onto and/or into a plant and/or associated microbes. In some embodiments, such an active system increases the effectiveness of the system e.g., 1.5 fold, 2 fold, 2.5 fold, 3 fold, 3.5 fold, 4 fold, 4.5 fold, 5 fold, 5.5 fold, 6 fold, 6.5 fold, 7 fold, 7.5 fold, 8 fold, 8.5 fold, 9 fold, 9.5 fold, 10 fold, or greater than 10 fold when compared to a control system.

[0302] In some embodiments, compositions described herein have an increased rate of diffusion when compared to an appropriate control. In some embodiments, an increased rate in diffusion may be due to an increase in stomatal flux. In some embodiments, an increase in stomatal flux may be due to an increase in total stomata number and/or density.

### Increasing Stomatal Flux

[0303] Stomata are microscopic structures located on the plant epidermis, consisting of a pair of guard cells acting as a valve that generates a central pore, providing access to air for mesophyll cells. Stomata act as the main gateway through which gasses, including indoor air pollutants, enter the interior of the plant. In some embodiments, to increase pollution absorption by a plant, stomatal conductance is modified. In some embodiments, stomatal conductance is increased relative to a control. In some embodiments, stomatal conductance is determined by stomatal density and stomatal aperture size.

[0304] In some embodiments, the present disclosure provides compositions and methods suitable for increasing and/or otherwise modifying the rate of stomatal conductance (e.g., passive or active diffusion rates of certain volatile compounds). In some embodiments, stomatal conductance is modified through the transgenic expression of genes associated with the positive regulation of stomatal density. In some embodiments, stomatal conductance is modified through the transgenic expression of an EPFL9 gene. In some embodiments, stomatal conductance is increased through the transgenic overexpression of an EPFL9 gene.

[0305] In some embodiments, stomatal flux is modified through the transgenic mediated downregulation of genes associated with the negative regulation of stomatal density. In some embodiments, stomatal conductance is modified by downregulation of Epidermal Patterning Factors Like proteins (e.g., EPFL1 and/or EPFL2) that are known to negatively regulate stomatal density. In some embodiments, stomatal conductance is increased by transgenic downregulation of Epidermal Patterning Factors Like proteins (e.g., EPFL1 and/or EPFL2).

[0306] In some embodiments, stomatal flux is modified through the transgenic mediated upregulation of MYB-like transcription factors associated with positive regulation of stomatal density. In some embodiments, stomatal conductance is modified through the transgenic expression of a GT2 like gene. In some embodiments, stomatal conductance is increased through the transgenic overexpression of a GT2 like gene.

[0307] In some embodiments, compositions and methods described herein comprise a combination of both negative stomatal density regulatory gene downregulation and positive stomatal density regulatory gene upregulation. In some embodiments, these combinations provide increased stomatal density leading to an increased gas exchange rate.

### Epidermal Patterning Factor-Like Protein 9 (EPF9)

[0308] In some embodiments, compositions and methods described herein comprise a transgenic Epidermal Patterning Factor-Like protein 9 (EPFL9) gene (also known as Stomagen). In some embodiments, EPFL9 genes produce an EPFL9 protein. In some embodiments, EPFL9 proteins are cleaved and secreted as a peptide. In some embodiments, EPFL9 functions to promote stomatal development. In some embodiments, EPFL9 is upregulated through transgene introduction. In some embodiments, an EPFL9 gene and/or transgene comprises a sequence encoding a peptide sequence that is at least 90%, 91%, 92%, 93%, 94%, 95%, 96%, 97%, 98%, 99%, or 100% identical to any one of SEQ ID NOs: 99 or 101 (or a portion thereof). In some embodiments, an EPFL9 gene and/or transgene comprises a nucleotide sequence that is at least 90%, 91%, 92%, 93%, 94%, 95%, 96%, 97%, 98%, 99%, or 100% identical to any one of SEQ ID NOs: 98 or 100 (or a portion thereof).

-Exemplary Arabidopsis thaliana Epidermal Patterning Factor-Like
protein 9 (AtStomagen)Nucleic Acid Coding Sequence
SEQ ID NO: 98
ATGAAACATGAAATGATGAACATTAAACCAAGATGCATTACAATATTTTTCTTATTGTTCGCTC
TGTTACTGGGAAACTATGTCGTACAGGCCTCCAGGCCTAGGTCCATAGAGAACACAGTTTCTCT
GTTGCCACAAGTCCACCTTTTAAATTCGCGAAGGAGACACATGATCGGGAGCACTGCACCAACA
TGTACTTATAATGAATGTAGAGGTTGTCGTTACAAATGTAGGGCAGAACAGGTGCCTGTAGAAG
GGAACGATCCTATTAACAGTGCATATCATTACCGCTGCGTGTGTCACAGGTGA
-Exemplary Arabidopsis thaliana Epidermal Patterning Factor-Like
protein 9 (AtStomagen) Amino Acid Sequence
SEQ ID NO: 99
MKHEMMNIKPRCITIFFLLFALLLGNYVVQASRPRSIENTVSLLPQVHLLNSRRRHMIGSTAPT
CTYNECRGCRYKCRAEQVPVEGNDPINSAYHYRCVCHR
-Exemplary Oryza sativa Epidermal Patterning Factor-Like protein 9, X1
and/or X2 (OsStomagenX1 and/or X2) Amino Acid Sequence
SEQ ID NO: 100
MANACPTSTTSSLPLFFLFCFLLFSHARCNQGHHGSISGTDYGEQYPHQTLPEEHIHLQENIKV
LNKERLPKYARRMLIGSTAPICTYNECRGCRFKCTAEQVPVDANDPMNSAYHYKCVCHR
-Exemplary Epipremnum aureum Epidermal Patterning Factor-Like
protein 9 (EaStomagen) Amino Acid Sequence
SEQ ID NO: 101
MIGSTAPTCSYNECRGCRFRCRAEQVPVDANDPINSAYHYRCVCHR

### Caprice (CPC)

[0309] In some embodiments, compositions and methods described herein comprise a transgenic Caprice gene. In some embodiments, a Caprice gene produces an R3-type MYB transcription factor protein. In some embodiments, R3-type MYB transcription factor proteins act to mediate transcription of pro-stomatal formation genes. In some embodiments, R3-type MYB transcription factors (e.g., as encoded by Caprice) function to promote stomatal development. In some embodiments, Caprice is upregulated through transgene introduction. In some embodiments, a Caprice gene and/or transgene comprises a sequence encoding a peptide sequence that is at least 90%, 91%, 92%, 93%, 94%, 95%, 96%, 97%, 98%, 99%, or 100% identical to SEQ ID NO: 103 (or a portion thereof). In some embodiments, a Caprice gene and/or om transgene comprises a nucleotide sequence that is at least 90%, 91%, 92%, 93%, 94%, 95%, 96%, 97%, 98%, 99%, or 100% identical to SEQ ID NO:102 (or a portion thereof).

-Exemplary Arabidopsis thaliana R3-type MYB transcription factor
(AtCaprice) Nucleotide Coding Sequence
SEQ ID NO: 102
ATGTTTAGAAGCGACAAGGCCGAGAAGATGGACAAACGACGGCGCAGGCAATCAAAAGCTAAGG
CATCCTGTTCTGAGGAAGTAAGTTCAATAGAATGGGAAGCTGTGAAAATGAGCGAAGAGGAAGA
GGATTTGATATCAAGAATGTATAAACTCGTGGGTGACAGATGGGAGTTAATAGCCGGGAGAATT
CCTGGTAGGACACCTGAAGAGATCGAGAGATATTGGTTGATGAAACATGGAGTAGTTTTCGCAA
ATCGGAGGCGAGACTTTTTCAGAAAGTGA
-Exemplary Arabidopsis thaliana R3-type MYB transcription factor
(AtCaprice) Amino Acid Sequence
SEQ ID NO: 103
MFRSDKAEKMDKRRRRQSKAKASCSEEVSSIEWEAVKMSEEEEDLISRMYKLVGDRWELIAGRI
PGRTPEEIERYWLMKHGVVFANRRRDFFRK

### MYB-Like Transcription Factor GT-2

[0310] In some embodiments, compositions and methods described herein comprise a transgenic GT-2 like gene. In some embodiments, a GT-2 like gene produces a MYB-like transcription factor protein. In some embodiments, a MYB-like transcription factor protein acts to mediate transcription of pro-stomatal formation genes. In some embodiments, a MYB-like transcription factor (e.g., as encoded by GT-2 like genes) functions to promote stomatal development. In some embodiments, GT-2 like genes are upregulated through transgene introduction. In some embodiments, a GT-2 like gene and/or transgene comprises a sequence encoding a peptide sequence that is at least 90%, 91%, 92%, 93%, 94%, 95%, 96%, 97%, 98%, 99%, or 100% identical to any one of SEQ ID NOs: 105, 107, or 109 (or a portion thereof). In some embodiments, a GT-2 like gene and/or transgene comprises a nucleotide sequence that is at least 90%, 91%, 92%, 93%, 94%, 95%, 96%, 97%, 98%, 99%, or 100% identical to any one of SEQ ID NOs: 104, 106, or 108 (or a portion thereof).

-Exemplary Arabidopsis thaliana MYB-like transcription factor (GT-2
like 1.1) Nucleotide Coding Sequence
SEQ ID NO: 104
ATGGAGCAAGGAGGAGGTGGTGGTGGTAATGAAGTTGTGGAGGAAGCTTCACCTATTAGTTCAA
GACCTCCTGCTAACAACTTAGAAGAGCTTATGAGATTCTCAGCCGCCGCGGATGACGGTGGATT
AGGAGGTGGAGGTGGAGGAGGAGGAGGAGGAAGTGCTTCTTCTTCATCGGGAAATCGATGGCCG
AGAGAAGAAACTTTAGCTCTTCTTCGGATCCGATCCGATATGGATTCTACTTTTCGTGATGCTA
CTCTCAAAGCTCCTCTTTGGGAACATGTTTCCAGGAAGCTATTGGAGTTAGGTTACAAACGAAG
TTCAAAGAAATGCAAAGAGAAATTCGAAAACGTTCAGAAATATTACAAACGTACTAAAGAAACT
CGCGGTGGTCGTCATGATGGTAAAGCTTACAAGTTCTTCTCTCAGCTTGAAGCTCTCAACACTA
CTCCTCCTTCATCTTCCCTCGACGTTACTCCTCTCTCCGTCGCTAATCCCATTCTCATGCCTTC
TTCTTCTTCTTCTCCATTTCCCGTATTCTCTCAACCGCAACCGCAAACGCAAACGCAACCGCCT
CAAACGCATAATGTCTCTTTTACTCCTACTCCACCACCTCTTCCACTTCCTTCAATGGGTCCGA
TATTTACCGGTGTTACTTTCTCGTCTCATAGCTCATCGACGGCTTCAGGAATGGGGTCTGATGA
TGATGACGACGATATGGACGTTGATCAGGCTAACATTGCGGGTTCTAGTAGCCGAAAACGCAAA
CGTGGAAACCGCGGTGGAGGCGGTAAAATGATGGAATTGTTTGAAGGTTTGGTGAGACAAGTAA
TGCAAAAGCAAGCGGCTATGCAAAGGAGTTTCTTGGAAGCTCTTGAGAAGAGAGAGCAAGAACG
TCTTGATCGTGAAGAAGCTTGGAAACGTCAAGAAATGGCTCGGTTAGCTCGAGAACACGAGGTC
ATGTCTCAAGAACGAGCCGCCTCTGCTTCTCGTGACGCCGCAATCATTTCATTGATTCAGAAAA
TTACTGGCCATACCATTCAGTTACCTCCTTCTTTGTCATCTCAACCGCCTCCACCGTATCAACC
GCCACCCGCGGTCACTAAACGTGTGGCGGAACCACCATTATCAACAGCTCAATCTCAATCACAA
CAACCAATAATGGCGATTCCACAACAACAAATTCTTCCTCCTCCTCCTCCTTCTCATCCTCACG
CTCATCAACCAGAACAGAAACAACAACAACAACCACAACAAGAGATGGTCATGAGCTCGGAACA
ATCATCATTACCATCATCATCAAGATGGCCAAAGGCAGAGATTCTAGCGCTTATAAACCTGAGA
AGTGGAATGGAACCAAGGTACCAAGATAATGTACCTAAAGGACTTCTATGGGAAGAGATCTCAA
CTTCAATGAAGAGAATGGGATACAACAGAAACGCTAAGAGATGTAAAGAGAAATGGGAAAACAT
AAACAAATACTACAAGAAAGTTAAAGAAAGCAACAAGAAACGTCCTCAAGATGCTAAGACTTGT
CCTTACTTTCACCGCCTCGATCTTCTTTACCGCAACAAAGTACTCGGTAGTGGCGGTGGTTCTA
GCACTTCTGGTCTACCTCAAGACCAAAAACAGAGTCCGGTCACTGCGATGAAACCGCCACAAGA
AGGACTTGTTAATGTTCAACAAACTCATGGGTCAGCTTCAACTGAGGAAGAAGAGCCTATAGAG
GAAAGTCCACAAGGAACAGAAAAGCCAGAAGACCTTGTGATGAGAGAGCTGATTCAACAACAAC
AGCAACTACAACAACAAGAATCAATGATAGGTGAGTATGAAAAGATTGAAGAGTCTCACAATTA
TAATAACATGGAGGAAGAGGAAGATCAGGAAATGGATGAGGAAGAACTAGACGAGGATGAGAAG
TCCGCGGCTTTCGAGATTGCGTTTCAAAGCCCTGCAAACAGAGGAGGCAATGGCCATACGGAAC
CACCTTTCTTGACAATGGTTCAGTAA
-Exemplary Arabidopsis thaliana MYB-like transcription factor (GT-2
like 1.1) Amino Acid Sequence
SEQ ID NO: 105
MEQGGGGGGNEVVEEASPISSRPPANNLEELMRFSAAADDGGLGGGGGGGGGGSASSSSGNRWP
REETLALLRIRSDMDSTFRDATLKAPLWEHVSRKLLELGYKRSSKKCKEKFENVQKYYKRTKET
RGGRHDGKAYKFFSQLEALNTTPPSSSLDVTPLSVANPILMPSSSSSPFPVFSQPQPQTQTQPP
QTHNVSFTPTPPPLPLPSMGPIFTGVTFSSHSSSTASGMGSDDDDDDMDVDQANIAGSSSRKRK
RGNRGGGGKMMELFEGLVRQVMQKQAAMQRSFLEALEKREQERLDREEAWKRQEMARLAREHEV
MSQERAASASRDAAIISLIQKITGHTIQLPPSLSSQPPPPYQPPPAVTKRVAEPPLSTAQSQSQ
QPIMAIPQQQILPPPPPSHPHAHQPEQKQQQQPQQEMVMSSEQSSLPSSSRWPKAEILALINLR
SGMEPRYQDNVPKGLLWEEISTSMKRMGYNRNAKRCKEKWENINKYYKKVKESNKKRPQDAKTC
PYFHRLDLLYRNKVLGSGGGSSTSGLPQDQKQSPVTAMKPPQEGLVNVQQTHGSASTEEEEPIE
ESPQGTEKPEDLVMRELIQQQQQLQQQESMIGEYEKIEESHNYNNMEEEEDQEMDEEELDEDEK
SAAFEIAFQSPANRGGNGHTEPPFLIMVQ
-Exemplary Arabidopsis thaliana MYB-like transcription factor (GT-2
like 1.2) Nucleotide Coding Sequence
SEQ ID NO: 106
ATGAGTTTCTGGGACGTTTTCGATTTTGAAAATCCCAAGACTCTCTTTACTTCCAAAAAAAAAA
AAAAAAAATCCGATCGAACAGTAACCATAAAAATTTTCCAGCTAATAACGACAACCAAAAATAA
AATAAAACTAGAGAATCTGAATTATTTTCATGTTTTTGGAAACAGGAAGCTATTGGAGTTAGGT
TACAAACGAAGTTCAAAGAAATGCAAAGAGAAATTCGAAAACGTTCAGAAATATTACAAACGTA
CTAAAGAAACTCGCGGTGGTCGTCATGATGGTAAAGCTTACAAGTTCTTCTCTCAGCTTGAAGC
TCTCAACACTACTCCTCCTTCATCTTCCCTCGACGTTACTCCTCTCTCCGTCGCTAATCCCATT
CTCATGCCTTCTTCTTCTTCTTCTCCATTTCCCGTATTCTCTCAACCGCAACCGCAAACGCAAA
CGCAACCGCCTCAAACGCATAATGTCTCTTTTACTCCTACTCCACCACCTCTTCCACTTCCTTC
AATGGGTCCGATATTTACCGGTGTTACTTTCTCGTCTCATAGCTCATCGACGGCTTCAGGAATG
GGGTCTGATGATGATGACGACGATATGGACGTTGATCAGGCTAACATTGCGGGTTCTAGTAGCC
GAAAACGCAAACGTGGAAACCGCGGTGGAGGCGGTAAAATGATGGAATTGTTTGAAGGTTTGGT
GAGACAAGTAATGCAAAAGCAAGCGGCTATGCAAAGGAGTTTCTTGGAAGCTCTTGAGAAGAGA
GAGCAAGAACGTCTTGATCGTGAAGAAGCTTGGAAACGTCAAGAAATGGCTCGGTTAGCTCGAG
AACACGAGGTCATGTCTCAAGAACGAGCCGCCTCTGCTTCTCGTGACGCCGCAATCATTTCATT
GATTCAGAAAATTACTGGCCATACCATTCAGTTACCTCCTTCTTTGTCATCTCAACCGCCTCCA
CCGTATCAACCGCCACCCGCGGTCACTAAACGTGTGGCGGAACCACCATTATCAACAGCTCAAT
CTCAATCACAACAACCAATAATGGCGATTCCACAACAACAAATTCTTCCTCCTCCTCCTCCTTC
TCATCCTCACGCTCATCAACCAGAACAGAAACAACAACAACAACCACAACAAGAGATGGTCATG
AGCTCGGAACAATCATCATTACCATCATCATCAAGATGGCCAAAGGCAGAGATTCTAGCGCTTA
TAAACCTGAGAAGTGGAATGGAACCAAGGTACCAAGATAATGTACCTAAAGGACTTCTATGGGA
AGAGATCTCAACTTCAATGAAGAGAATGGGATACAACAGAAACGCTAAGAGATGTAAAGAGAAA
TGGGAAAACATAAACAAATACTACAAGAAAGTTAAAGAAAGCAACAAGAAACGTCCTCAAGATG
CTAAGACTTGTCCTTACTTTCACCGCCTCGATCTTCTTTACCGCAACAAAGTACTCGGTAGTGG
CGGTGGTTCTAGCACTTCTGGTCTACCTCAAGACCAAAAACAGAGTCCGGTCACTGCGATGAAA
CCGCCACAAGAAGGACTTGTTAATGTTCAACAAACTCATGGGTCAGCTTCAACTGAGGAAGAAG
AGCCTATAGAGGAAAGTCCACAAGGAACAGAAAAGCCAGAAGACCTTGTGATGAGAGAGCTGAT
TCAACAACAACAGCAACTACAACAACAAGAATCAATGATAGGTGAGTATGAAAAGATTGAAGAG
TCTCACAATTATAATAACATGGAGGAAGAGGAAGATCAGGAAATGGATGAGGAAGAACTAGACG
AGGATGAGAAGTCCGCGGCTTTCGAGATTGCGTTTCAAAGCCCTGCAAACAGAGGAGGCAATGG
CCATACGGAACCACCTTTCTTGACAATGGTTCAGTAA
-Exemplary Arabidopsis thaliana MYB-like transcription factor (GT-2
like 1.2) Amino Acid Sequence
SEQ ID NO: 107
MSFWDVFDFENPKTLFTSKKKKKKSDRTVTIKIFQLITTTKNKIKLENLNYFHVFGNRKLLELG
YKRSSKKCKEKFENVQKYYKRTKETRGGRHDGKAYKFFSQLEALNTTPPSSSLDVTPLSVANPI
LMPSSSSSPFPVFSQPQPQTQTQPPQTHNVSFTPTPPPLPLPSMGPIFTGVTFSSHSSSTASGM
GSDDDDDDMDVDQANIAGSSSRKRKRGNRGGGGKMMELFEGLVRQVMQKQAAMQRSFLEALEKR
EQERLDREEAWKRQEMARLAREHEVMSQERAASASRDAAIISLIQKITGHTIQLPPSLSSQPPP
PYQPPPAVTKRVAEPPLSTAQSQSQQPIMAIPQQQILPPPPPSHPHAHQPEQKQQQQPQQEMVM
SSEQSSLPSSSRWPKAEILALINLRSGMEPRYQDNVPKGLLWEEISTSMKRMGYNRNAKRCKEK
WENINKYYKKVKESNKKRPQDAKTCPYFHRLDLLYRNKVLGSGGGSSTSGLPQDQKQSPVTAMK
PPQEGLVNVQQTHGSASTEEEEPIEESPQGTEKPEDLVMRELIQQQQQLQQQESMIGEYEKIEE
SHNYNNMEEEEDQEMDEEELDEDEKSAAFEIAFQSPANRGGNGHTEPPFLTMVQ
-Exemplary Arabidopsis thaliana MYB-like transcription factor (GT-2
like 1.3) Nucleotide Coding Sequence
SEQ ID NO: 108
ATGGAGCAAGGAGGAGGTGGTGGTGGTAATGAAGTTGTGGAGGAAGCTTCACCTATTAGTTCAA
GACCTCCTGCTAACAACTTAGAAGAGCTTATGAGATTCTCAGCCGCCGCGGATGACGGTGGATT
AGGAGGTGGAGGTGGAGGAGGAGGAGGAGGAAGTGCTTCTTCTTCATCGGGAAATCGATGGCCG
AGAGAAGAAACTTTAGCTCTTCTTCGGATCCGATCCGATATGGATTCTACTTTTCGTGATGCTA
CTCTCAAAGCTCCTCTTTGGGAACATGTTTCCAGGAAGCTATTGGAGTTAGGTTACAAACGAAG
TTCAAAGAAATGCAAAGAGAAATTCGAAAACGTTCAGAAATATTACAAACGTACTAAAGAAACT
CGCGGTGGTCGTCATGATGGTAAAGCTTACAAGTTCTTCTCTCAGCTTGAAGCTCTCAACACTA
CTCCTCCTTCATCTTCCCTCGACGTTACTCCTCTCTCCGTCGCTAATCCCATTCTCATGCCTTC
TTCTTCTTCTTCTCCATTTCCCGTATTCTCTCAACCGCAACCGCAAACGCAAACGCAACCGCCT
CAAACGCATAATGTCTCTTTTACTCCTACTCCACCACCTCTTCCACTTCCTTCAATGGGTCCGA
TATTTACCGGTGTTACTTTCTCGTCTCATAGCTCATCGACGGCTTCAGGAATGGGGTCTGATGA
TGATGACGACGATATGGACGTTGATCAGGCTAACATTGCGGGTTCTAGTAGCCGAAAACGCAAA
CGTGGAAACCGCGGTGGAGGCGGTAAAATGATGGAATTGTTTGAAGGTTTGGTGAGACAAGTAA
TGCAAAAGCAAGCGGCTATGCAAAGGAGTTTCTTGGAAGCTCTTGAGAAGAGAGAGCAAGAACG
TCTTGATCGTGAAGAAGCTTGGAAACGTCAAGAAATGGCTCGGTTAGCTCGAGAACACGAGGTC
ATGTCTCAAGAACGAGCCGCCTCTGCTTCTCGTGACGCCGCAATCATTTCATTGATTCAGAAAA
TTACTGGCCATACCATTCAGTTACCTCCTTCTTTGTCATCTCAACCGCCTCCACCGTATCAACC
GCCACCCGCGGTCACTAAACGTGTGGCGGAACCACCATTATCAACAGCTCAATCTCAATCACAA
CAACCAATAATGGCGATTCCACAACAACAAATTCTTCCTCCTCCTCCTCCTTCTCATCCTCACG
CTCATCAACCAGAACAGAAACAACAACAACAACCACAACAAGAGATGGTCATGAGCTCGGAACA
ATCATCATTACCATCATCATCAAGATGGCCAAAGGCAGAGATTCTAGCGCTTATAAACCTGAGA
AGTGGAATGGAACCAAGGTACCAAGATAATGTACCTAAAGGACTTCTATGGGAAGAGATCTCAA
CTTCAATGAAGAGAATGGGATACAACAGAAACGCTAAGAGATGTAAAGAGAAATGGGAAAACAT
AAACAAATACTACAAGAAAGTTAAAGAAAGCAACAAGAAACGTCCTCAAGATGCTAAGACTTGT
CCTTACTTTCACCGCCTCGATCTTCTTTACCGCAACAAAGTACTCGGTAGTGGCGGTGGTTCTA
GCACTTCTGGTCTACCTCAAGACCAAAAACAGAGTCCGGTCACTGCGATGAAACCGCCACAAGA
AGGACTTGTTAATGTTCAACAAACTCATGGGTCAGCTTCAACTGAGGAAGAAGAGCCTATAGAG
GAAAGTCCACAAGGAACAGAAAAGGTACAAACTTTGCTTTTCCTTGTCAAAATGTGA
-Exemplary Arabidopsis thaliana MYB-like transcription factor (GT-2
like 1.3) Amino Acid Sequence
SEQ ID NO: 109
MEQGGGGGGNEVVEEASPISSRPPANNLEELMRFSAAADDGGLGGGGGGGGGGSASSSSGNRWP
REETLALLRIRSDMDSTFRDATLKAPLWEHVSRKLLELGYKRSSKKCKEKFENVQKYYKRTKET
RGGRHDGKAYKFFSQLEALNTTPPSSSLDVTPLSVANPILMPSSSSSPFPVFSQPQPQTQTQPP
QTHNVSFTPTPPPLPLPSMGPIFTGVTFSSHSSSTASGMGSDDDDDDMDVDQANIAGSSSRKRK
RGNRGGGGKMMELFEGLVRQVMQKQAAMQRSFLEALEKREQERLDREEAWKRQEMARLAREHEV
MSQERAASASRDAAIISLIQKITGHTIQLPPSLSSQPPPPYQPPPAVTKRVAEPPLSTAQSQSQ
QPIMAIPQQQILPPPPPSHPHAHQPEQKQQQQPQQEMVMSSEQSSLPSSSRWPKAEILALINLR
SGMEPRYQDNVPKGLLWEEISTSMKRMGYNRNAKRCKEKWENINKYYKKVKESNKKRPQDAKTC
PYFHRLDLLYRNKVLGSGGGSSTSGLPQDQKQSPVTAMKPPQEGLVNVQQTHGSASTEEEEPIE
ESPQGTEKVQTLLFLVKM

### Modifying Cuticle Wax Levels

[0311] In some embodiments, compositions and methods of the present disclosure comprise modified (e.g., increased) levels of certain plant cuticle waxes. In some embodiments, such a modification is facilitated through transgene introduction, gene knockdown, and/or gene knockout using materials and methods described herein.

[0312] A plant cuticle is an extracellular lipophilic biopolymer that often covers both leaf and fruit surfaces (see FIG. 1). It is thought that the cuticle's main function is the protection of land-living plants from uncontrolled water loss. In the past, the permeability of the cuticle to water and to non-ionic lipophilic molecules (pesticides, herbicides and other xenobiotics) was studied intensively, whereas cuticular penetration of polar ionic compounds was rarely investigated.

[0313] In most cases, the plant cuticle membrane is composed of the depolymerizable biopolymer cutin (Kolattukudy, 2001), the non-depolymerizable polymer cutan (Tegelaar et al., 1993) and associated soluble cuticular lipids also called cuticular waxes (Jenks and Ashworth, 2003). In general, waxes are predominantly linear, long-chain, aliphatic molecules with different functionalities (alkanes, alcohols, aldehydes, acids, etc.). In general, waxes are solid, partially crystalline aggregates at room temperature (Reynhardt, 1997). In some embodiments, waxes can be found in the outer parts of the cutin polymer (intra-cuticular waxes) and on its surface (epicuticular waxes). In some embodiments, the permeability of the cuticle to water and to organic compounds increases upon wax extraction by factors between 10 and 1000, in such cases, it may be concluded that the cuticular transport barrier is largely formed by these cuticular waxes (Schönherr, 1976).

[0314] In some embodiments, a phyllosphere and/or endosphere (e.g., the above-ground parts of the plant) represent a major battleground for plant-microbe interactions (Junker and Tholl, 2013). In some embodiments, these surfaces are covered by a matrix collectively designated as (epi) cuticular waxes (Buschhaus and Jetter, 2011): complex mixtures of hydrophobic compounds such as long-chain esters-compounds chemically considered as waxes (Bruice, 2006)—and other lipophilic compounds such as saturated aliphatic hydrocarbon chains of at least 20 carbons, pentacyclic triterpenoids, and phenylpropanoids (Vogg et al., 2004; Kunst and Samuels, 2009; Buschhaus and Jetter, 2011; Hama et al., 2019). Thus, due to the lipophilic nature of these epicuticular waxes, it has been proposed that endogenous VOCs can accumulate in the epicuticular wax layers of plants (Widhalm et al., 2015).

[0315] In some embodiments, VOCs can also be sequestered by plant cuticular waxes. In such an embodiment, certain VOCs may maintain their biological activity, and such a sequestered VOCs could generate a “passive” associational resistance and/or selective pressure that is independent of a gene expression in a host plant.

[0316] In some embodiments, a pathway for VOC uptake by an aboveground portion of a plant parts is likely dependent on properties of a VOCs. In some embodiments, a hydrophilic VOC such as formaldehyde may not diffuse easily through the cuticle that consists of lipids, whereas, in some embodiments, a lipophilic VOC such as benzene is more likely to penetrate through such a cuticle. In some embodiments, relative importance of stomatal uptake compared to cuticular uptake may therefore be dependent on a VOC in question.

### Aldehyde Decarbonylase (CER1)

[0317] In some embodiments, long-chain alkanes are synthesized from fatty acids through the intermediacy of the corresponding fatty aldehydes. Such molecules act as substrates for a group of enzymes, the aldehyde decarbonylases, which catalyze the removal of the aldehyde carbonyl group to form the alkane. It is predicted that such enzymes are likely to be integral membrane proteins and contain an “eight histidine” motif common to stearoyl desaturases and fatty acid hydroxylases.

[0318] In some embodiments, an Aldehyde Decarbonylase gene and/or transgene comprises a sequence encoding a peptide sequence that is at least 90%, 91%, 92%, 93%, 94%, 95%, 96%, 97%, 98%, 99%, or 100% identical to SEQ ID NO: 111 (or a portion thereof). In some embodiments, an Aldehyde Decarbonylase gene and/or transgene comprises a nucleotide sequence that is at least 90%, 91%, 92%, 93%, 94%, 95%, 96%, 97%, 98%, 99%, or 100% identical to SEQ ID NO: 110 (or a portion thereof).

-Exemplary Nicotiana tabacum Aldehyde Decarbonylase (CER1, aka
Eceriferum 1) Nucleic Acid Coding Sequence
SEQ ID NO: 110
ATGGCTTCTAAACCAGGCATTCTAACAGAATGGCCATGGACATGGCTTGGGAACTTCAAGTACG
TGGTTTTGGCACCATATGTGGCTCACAGCCTACACTCATTCTTCATGAGCGAAGATGAAAGCAA
GAGGGATATCACATACTTAATTATATTTCCATTTCTACTCTTCCGAATGCTTCACAACCAGATA
TGGATATCCTTATCTCGCTACAGAACTGCCAAGGGTGATAACCGAATTGTTGACAAGAGCATTG
AATTTGATCAAGTTGACAGAGAAAGAAACTGGGATGATCAGATCATACTTAACGGACTGCTGTT
CTACTATGGATACACGAAGCTGGAGCAGTCTCATCACATGCCTATTTGGAGGACAGATGGGATC
ATTATGACAGCTTTGCTCCAAACTGGTCCTGTTGAATTTCTCTACTATTGGCTTCACAGAGCTT
TACACCACCATTTCCTTTACTCTCGCTATCATTCTCATCACCATTCCTCCATTGTCACTGAACC
CATTACTTCTGTGATTCATCCATTTGCAGAGCATATAGCATACTTCTTGCTATTTGCCATCCCA
CTTCTCACAACTGTGCTAACTGGGACTGCTTCAATAGTTTCATTTGGTGGATATATTACTTATA
TTGATTTTATGAATAACATGGGGCATTGCAACTTTGAGATCATTCCAAAGTGGATGTTCTCCAG
CTTTCCCCCTCTCAAATACTTGATGTATACACCCTCGTATCATTCACTCCATCACACTCAATTT
AGAACAAACTACTCGCTTTTTATGCCAATGTACGATTACATTTACGATACACTAGACAAATCTT
CAGACACATTATACGAAAAATCACTTGAAAGGCAAGGCAAATCGCCGGATGTGGTGCACCTAAC
ACACCTAACAACCCCAGAATCCATTTACCATCTCAGGCTAGGATTTGCTTCTTTTGCCTCGGAA
CCTTACACCTCTAAGTGGTATTTTTGGTTAATGTGGCCTGTTACATTGTGGTCTATGATGATTA
CTTGGATTTATGGTCACACATTTACTGTTGAGAGAAATGTGTTCAAGAGTCTGAATTTGCAAAC
TTGGGCGATCCCAAAATATCGCATACAATATTTTATGCAATGGCAAAGAGAGACGATTAACAAC
TTTATTGAGGAAGCTATCATGGAAGCAGATCGAAAAGGCATAAAAGTATTGAGCCTTGGACTCT
TAAATCAGGAGGAGCAACTGAATAATAATGGTGAGCTTTACATAAGAAGGCATCCTCAGCTCAA
AGTGAAGGTGGTTGATGGAAGTAGCCTAGCTGTTGCTGTGGTCCTAAACTCTATTCCTAAAGGA
ACCACACAAGTGGTCCTTGGAGGCCATTTGTCGAAAGTTGCAAATGCGATTGCCCTTGCCTTAT
GCCAAGGAGGAGTAAAGGTTGTGACATTGCGAGAAGAAGAGTACAAGAAGCTCAAATCAAGTCT
TACCCCTGAAGTCGCAATTAATTTGGTTCCCTCAAAAACATATGCTTCAAAGATATGGCTAGTA
GGGGATGGATTGAGTGAAGATGAACAATTGAAAGCACCAAAAGGAACATTATTCATTCCCTTTT
CACAATTCCCACCAAGGAAAGCTCGCAAGGATTGCCTCTACTTTCACACACCAGCCATGATCAC
TCCAAAACACTTTGAAAACGTGGACTCCTGTGAGAATTGGCTTCCAAGAAGAGTGATGAGCGCG
TGGCGAGTAGCTGGAATATTGCACGCACTGAAAGGCTGGAATGAGCATGAGTGTGGGAACATGA
TCTTTGATATTGAGAAAGTCTGGAAAGCAAGTCTTGATCACGGTTTTAGCCCATTGACTATGGC
TTCTGCTTCTGAATCCAAGGCTTAA
-Exemplary Nicotiana tabacum Aldehyde Decarbonylase (CER1, aka
Eceriferum 1) Amino Acid Sequence
SEQ ID NO: 111
MASKPGILTEWPWTWLGNFKYVVLAPYVAHSLHSFFMSEDESKRDITYLIIFPFLLFRMLHNQI
WISLSRYRTAKGDNRIVDKSIEFDQVDRERNWDDQIILNGLLFYYGYTKLEQSHHMPIWRIDGI
IMTALLQTGPVEFLYYWLHRALHHHFLYSRYHSHHHSSIVTEPITSVIHPFAEHIAYFLLFAIP
LLTTVLTGTASIVSFGGYITYIDFMNNMGHCNFEIIPKWMFSSFPPLKYLMYTPSYHSLHHTQF
RTNYSLFMPMYDYIYDTLDKSSDTLYEKSLERQGKSPDVVHLTHLTTPESIYHLRLGFASFASE
PYTSKWYFWLMWPVTLWSMMITWIYGHTFTVERNVFKSLNLQTWAIPKYRIQYFMQWQRETINN
FIEEAIMEADRKGIKVLSLGLLNQEEQLNNNGELYIRRHPQLKVKVVDGSSLAVAVVLNSIPKG
TTQVVLGGHLSKVANAIALALCQGGVKVVTLREEEYKKLKSSLTPEVAINLVPSKTYASKIWLV
GDGLSEDEQLKAPKGTLFIPFSQFPPRKARKDCLYFHTPAMITPKHFENVDSCENWLPRRVMSA
WRVAGILHALKGWNEHECGNMIFDIEKVWKASLDHGFSPLTMASASESKA

### 3-Ketoacyl-CoA-Synthase (CER6)

[0319] In some embodiments, a composition described herein comprises a transgenic 3-ketoacyl-CoA-synthase. Such an enzyme, among other things, contributes to cuticular wax and suberin biosynthesis and is involved in both decarbonylation and acyl-reduction wax synthesis pathways.

[0320] In some embodiments, a 3-ketoacyl-CoA-synthase gene and/or transgene comprises a sequence encoding a peptide sequence that is at least 90%, 91%, 92%, 93%, 94%, 95%, 96%, 97%, 98%, 99%, or 100% identical to SEQ ID NO: 113 (or a portion thereof). In some embodiments, a 3-ketoacyl-CoA-synthase gene and/or transgene comprises a nucleotide sequence that is at least 90%, 91%, 92%, 93%, 94%, 95%, 96%, 97%, 98%, 99%, or 100% identical to SEQ ID NO: 112 (or a portion thereof).

-Exemplary Nicotiana tabacum 3-ketoacyl-CoA-synthase (CER6, aka
Eceriferum 6) Nucleic Acid Coding Sequence
SEQ ID NO: 112
ATGGCAGAAGTAGTCCCAAGTTTCTCTAATTCAGTGAAGCTCAAATATGTCAAACTTGGTTATC
AATACCTTGTTAATCATATTCTAACATTTTTGCTTGTGCCTATTATGGTTGGTGTTACTATAGA
GGTATTAAGACTTGGCCCTGAAGAATTGCTAAGCATATGGAATTCACTCCACTTTGATCTTCTT
CAAATCCTTTGCTCTTCTTTTCCCATCATCTTCATAGCCACTGTTTACTTCATGTCCAAACCTC
GATCAATTTACCTTGTAGATTATTCATGTTACAAAGCTCCGGTTACCTGCCGAGTCCCATTTTC
AACTTTCATGGAACACTCTAGGCTCATTTTGAAGGATAATCCCAAGAGTGTCGAGTTCCAAATG
CGTATTCTTGAAAGGTCTGGCCTTGGAGAAGAAACGTGCTTGCCTCCTGCTATTCATTATATCC
CTCCAACACCAACTATGGAAGCTGCTAGAGGTGAAGCAGAAGTGGTCATATTCTCAGCAATTGA
TGACCTAATGAAGAAAACAGGACTCAAGCCAAAGGATATTGACATTCTTATTGTCAACTGCAGC
TTGTTTTCTCCAACTCCATCTTTATCAGCTATGGTAGTGAACAAATACAAGTTGAGAAGTAACA
TAAAAAGTTACAATCTTTCTGGTATGGGATGTAGTGCTGGTTTAATATCAATTGATTTAGCTAG
GGATCTTCTTCAAGTCCATCCAAATTCAAATGCTTTAGTTGTAAGCACTGAGATTATCACACCT
AATTATTACAAAGGTTCAGAGAGAGCAATGCTTCTACCAAATTGTTTGTTCCGTATGGGTGGTG
CAGCCATACTCTTGTCCAACAAAAGGCGCGATAGATACAGAGCAAAGTACAGATTAATGCACGT
GGTCCGAACACATAAGGGTGCAGATGATAAGGCATTTAAATGTGTATTTGAACAAGAAGATCCA
CAAGGGAAAGTTGGTATTAATTTATCAAAAGACCTTATGGTTATAGCAGGAGAAGCTTTAAAAT
CCAACATTACTACAATTGGTCCTTTAGTTCTTCCAGCATCAGAGCAACTCCTTTTTCTCCTCAC
ACTTATTAGTCGGAAATTTTTTAATCCCAAGTTGAAACCTTATATTCCGGATTTTAAACAAGCG
TTTGAACATTTTTGTATTCATGCGGGTGGTCGGGCTGTTATTGATGAACTTCAAAAGAACCTAC
AATTGTCTGCTGAACATGTTGAGGCATCAAGAATGACATTGCATAGATTTGGTAACACTTCATC
TTCTTCACTATGGTATGAGATGAGTTATATTGAGGCTAAAGGTAGGATGAAGAAAGGTGATAGA
GTTTGGCAGATTGCATTTGGGAGTGGATTTAAGTGTAACAGTGCTGTTTGGAAATGTAACAGAA
CAATAAAGACACCAACTGATGGGCCATGGCAAGATTGCATTGATAGGTATCCAGTCCACATTCC
AGAGATTGTCAAGCTCTAA
-Exemplary Nicotiana tabacum 3-ketoacyl-CoA-synthase (CER6, aka
Eceriferum 6) Amino Acid Sequence
SEQ ID NO: 113
MAEVVPSFSNSVKLKYVKLGYQYLVNHILTFLLVPIMVGVTIEVLRLGPEELLSIWNSLHFDLL
QILCSSFPIIFIATVYFMSKPRSTYLVDYSCYKAPVTCRVPFSTFMEHSRLILKDNPKSVEFQM
RILERSGLGEETCLPPAIHYIPPTPTMEAARGEAEVVIFSAIDDLMKKTGLKPKDIDILIVNCS
LFSPTPSLSAMVVNKYKLRSNIKSYNLSGMGCSAGLISIDLARDLLQVHPNSNALVVSTEIITP
NYYKGSERAMLLPNCLFRMGGAAILLSNKRRDRYRAKYRLMHVVRTHKGADDKAFKCVFEQEDP
QGKVGINLSKDLMVIAGEALKSNITTIGPLVLPASEQLLFLLTLISRKFFNPKLKPYIPDFKQA
FEHFCIHAGGRAVIDELQKNLQLSAEHVEASRMTLHRFGNTSSSSLWYEMSYIEAKGRMKKGDR
VWQIAFGSGFKCNSAVWKCNRTIKTPTDGPWQDCIDRYPVHIPEIVKL

### R2R3 MYB Transcription Factor

[0321] In some embodiments, a composition described herein comprises a transgenic R2R3 MYB transcription factor. Such a protein, among other things, may regulate different biological processes, such as primary and secondary metabolism, responses to biotic and abiotic stresses, developmental processes, and hormonal responses.

[0322] In some embodiments, a R2R3 MYB transcription factor gene and/or transgene comprises a sequence encoding a peptide sequence that is at least 90%, 91%, 92%, 93%, 94%, 95%, 96%, 97%, 98%, 99%, or 100% identical to SEQ ID NO: 115 (or a portion thereof). In some embodiments, a R2R3 MYB transcription factor gene and/or transgene comprises a nucleotide sequence that is at least 90%, 91%, 92%, 93%, 94%, 95%, 96%, 97%, 98%, 99%, or 100% identical to SEQ ID NO: 114 (or a portion thereof).

-Exemplary Nicotiana tabacum R2R3 MYB transcription factor (Myb-
related protein 306-like) Nucleic Acid Coding Sequence
SEQ ID NO: 114
ATGGGAAGGCCACCTTGTTGTGATAAAATAGGGGTGAAGAAAGGACCATGGACACCAGAAGAGG
ATATCATCTTGGTTTCATACATTCAACAACATGGTCCTGGTAACTGGAGAGCTGTTCCCAGTAA
TACTGGTTTGCTTAGATGCAGCAAAAGCTGTAGACTTAGATGGACTAATTATCTCCGTCCGGGA
ATCAAACGTGGCAACTTCACAGAACATGAAGAAAAGATGATTATTCACCTCCAAGCTCTTCTTG
GCAACAGATGGGCTGCGATAGCATCATATCTCCCACAAAGGACGGACAACGATATAAAAAATTA
CTGGAATACTCATCTGAGAAAGAAGCTGAAGAAACTTCAAGGGAATGATGAGAATAGTAATCAA
GAGGGAATACGCTCATCGTCTCAATCAAATGTCTCAAAAGGACAGTGGGAGAGGAGGCTTCAAA
CTGATATCCACATGGCTAAAAAAGCCCTTTGTGAGGCTTTGTCCCTTGACAAATCTGATTCTCC
GCCAAATAATCCTATCCCTCAACCTGTTCAATCATCTTGTACTTATGCATCTAGTGCTGAAAAT
ATTTCTCGATTGCTTCAAAATTGGATGAAAAATTCCCCCAAATCATCTCAATTTAGTCAATCAA
ACTCGGAGTGTACTACTCAAAGCTCCTTTAACAATTTATCAATCGGGCAGGGTTCGAGTTCTAG
TCCTAGTGAAGGGACCATAAGTGCAACAACACCCGAGGGTTTTGATCCGCTCTTTAGCTTCAAT
TCATCCAATACTGATATGTTGGCAGATGAGAGTAACGCTTTCACACCTGAAAATGCTAGGATTT
TTCAAGTTGAAAGCAAGCCAGATTTGCCGAATCTGAATGCTGAAAATGGATTTTTATTTCAAGA
GGAGAGCAAGCCAAGTTTGGAATCGGAAGTGCCATTAACTTTGCTGGAGAAGTGGCTCTTTGAT
GATGCTATTAATGCACCAGCACAAGAAAACCTAATGGGATTGGGAATAGGAATGGGAATGACCT
TGGGTGATGCTTCTGATTTGTTTTGA
-Exemplary Nicotiana tabacum R2R3 MYB transcription factor (Myb-
related protein 306-like) Amino Acid Sequence
SEQ ID NO: 115
MGRPPCCDKIGVKKGPWTPEEDIILVSYIQQHGPGNWRAVPSNTGLLRCSKSCRLRWTNYLRPG
IKRGNFTEHEEKMIIHLQALLGNRWAAIASYLPQRTDNDIKNYWNTHLRKKLKKLQGNDENSNQ
EGIRSSSQSNVSKGQWERRLQTDIHMAKKALCEALSLDKSDSPPNNPIPQPVQSSCTYASSAEN
ISRLLQNWMKNSPKSSQFSQSNSECTTQSSENNLSIGQGSSSSPSEGTISATTPEGFDPLFSFN
SSNTDMLADESNAFTPENARIFQVESKPDLPNLNAENGFLFQEESKPSLESEVPLILLEKWLFD
DAINAPAQENLMGLGIGMGMTLGDASDLF

### Wax Crystal-Sparse Leaf2/Glossy 1-1 (GL1-1)

[0323] In some embodiments, a composition described herein comprises a transgenic very-long chain aldehyde decarbonylase. In some embodiments, a very-long chain aldehyde decarbonylase is a homolog of CER3, WAX2, and/or GL1. In some embodiments, a very-long-chain aldehyde decarbonylase is GL1-1.

[0324] In some embodiments, a GL1-1 gene and/or transgene comprises a sequence encoding a peptide sequence that is at least 90%, 91%, 92%, 93%, 94%, 95%, 96%, 97%, 98%, 99%, or 100% identical to SEQ ID NO: 117 (or a portion thereof). In some embodiments, a GL1-1 gene and/or transgene comprises a nucleotide sequence that is at least 90%, 91%, 92%, 93%, 94%, 95%, 96%, 97%, 98%, 99%, or 100% identical to SEQ ID NO: 116 (or a portion thereof).

-Exemplary Oriza sativa very-long-chain aldehyde decarbonylase (GL1-1,
aka wax crystal-sparse leaf-2) Nucleotide Coding Sequence
SEQ ID NO: 116
ATGGGTGCCGCATTCTTGTCGTCGTGGCCATGGGATAACCTCGGCGCGTACAAGTATGTGTTGT
ACGCGCCGCTGGTGGGGAAGGCGGTGGCGGGGGGGGCGTGGGAGCGGGCGAGCCCCGACCACTG
GCTGCTGCTGCTGCTCGTCCTCTTCGGCGTCAGGGCCTTGACCTACCAGCTCTGGAGCTCGTTC
AGCAACATGCTCTTCGCCACCCGCCGCCGCCGCATCGTCCGCGACGGCGTCGACTTCGGCCAGA
TCGACAGGGAGTGGGACTGGGACAACTTCTTGATACTGCAGGTGCACATGGCGGCGGCGGCGTT
CTACGCGTTCCCGTCGCTGCGGCACCTCCCGCTGTGGGACGCCAGGGGCCTCGCCGTCGCCGCG
CTCCTCCACGTCGCCGCCACCGAGCCCCTGTTCTACGCCGCGCACAGGGCGTTCCACCGCGGCC
ACCTCTTCTCCTGCTACCACTTGCAACACCACTCCGCCAAGGTGCCCCAGCCATTCACAGCGGG
GTTCGCGACGCCGCTGGAGCAGCTGGTGCTGGGGGCGCTCATGGCGGTGCCGCTGGCGGCGGCG
TGCGCGGCGGGGCACGGCTCCGTCGCGCTGGCCTTCGCCTACGTGCTGGGTTTCGACAACCTCC
GCGCCATGGGCCACTGCAACGTCGAGGTGTTCCCCGGCGGCCTCTTCCAGTCGCTCCCCGTCCT
CAAATACCTTATCTACACCCCAACGTACCACACGATCCATCACACCAAGGAGGATGCCAACTTC
TGCCTGTTCATGCCGCTGTTCGACCTCATCGGTGGCACCCTCGACGCCCAGTCCTGGGAGATGC
AGAAGAAAACCAGCGCAGGGGTGGACGAGGTGCCGGAGTTCGTGTTCCTGGCGCACGTGGTGGA
CGTGATGCAGTCGCTGCACGTGCCGTTCGTGCTGCGGACGTTCGCGTCGACGCCCTTCTCGGTG
CAGCCGTTCCTGCTGCCCATGTGGCCGTTCGCGTTCCTCGTCATGCTCATGATGTGGGCGTGGT
CCAAGACCTTCGTCATCTCCTGCTACCGCCTCCGCGGCCGCCTCCACCAGATGTGGGCCGTCCC
CCGCTACGGCTTCCACTACTTCCTGCCGTTCGCCAAGGACGGCATCAACAACCAGATCGAGCTC
GCCATCCTCAGGGCGGACAAGATGGGCGCCAAGGTGGTCAGCCTCGCCGCTCTCAACAAGAATG
AGGCGCTGAACGGTGGCGGGACGCTGTTCGTGAACAAGCACCCGGGGCTCCGGGTGCGCGTCGT
CCACGGCAACACGCTGACGGCGGCGGTGATCCTCAACGAGATCCCGCAGGGCACCACCGAGGTG
TTCATGACCGGCGCCACGTCCAAGCTCGGCCGCGCCATCGCCCTCTACCTCTGCAGGAAGAAAG
TCCGCGTCATGATGATGACGCTGTCGACGGAGAGATTCCAGAAGATACAGAGGGAGGCGACGCC
GGAGCACCAGCAGTACCTGGTGCAGGTGACCAAGTACAGGTCGGCGCAGCACTGCAAGACGTGG
ATCGTCGGCAAGTGGCTGTCGCCGAGGGAGCAGCGTTGGGCGCCGCCGGGGACGCACTTCCACC
AGTTCGTCGTCCCCCCAATCATCGGCTTCCGCCGCGACTGCACCTACGGCAAGCTCGCCGCCAT
GCGCCTCCCCAAGGACGTCCAGGGCCTCGGCGCCTGCGAGTACTCGCTGGAGCGCGGGGTGGTG
CACGCGTGCCACGCCGGAGGCGTGGTGCACTTCCTGGAGGGGTACACGCACCACGAGGTGGGCG
CCATCGACGTGGACCGCATCGACGTCGTGTGGGAGGCGGCGCTCAGGCACGGCCTCCGGCCTGT
CTGA
-Exemplary Oriza sativa ver-long-chain aldehyde decarbonylase (GL1-1,
aka wax crystal-sparse leaf-2) Amino Acid Sequence
SEQ ID NO: 117
MGAAFLSSWPWDNLGAYKYVLYAPLVGKAVAGRAWERASPDHWLLLLLVLFGVRALTYQLWSSF
SNMLFATRRRRIVRDGVDFGQIDREWDWDNFLILQVHMAAAAFYAFPSLRHLPLWDARGLAVAA
LLHVAATEPLFYAAHRAFHRGHLFSCYHLQHHSAKVPQPFTAGFATPLEQLVLGALMAVPLAAA
CAAGHGSVALAFAYVLGFDNLRAMGHCNVEVFPGGLFQSLPVLKYLIYTPTYHTIHHTKEDANF
CLFMPLFDLIGGTLDAQSWEMQKKTSAGVDEVPEFVFLAHVVDVMQSLHVPFVLRTFASTPFSV
QPFLLPMWPFAFLVMLMMWAWSKIFVISCYRLRGRLHQMWAVPRYGFHYFLPFAKDGINNQIEL
AILRADKMGAKVVSLAALNKNEALNGGGTLFVNKHPGLRVRVVHGNTLTAAVILNEIPQGTTEV
FMTGATSKLGRAIALYLCRKKVRVMMMTLSTERFQKIQREATPEHQQYLVQVTKYRSAQHCKTW
IVGKWLSPREQRWAPPGTHFHQFVVPPIIGFRRDCTYGKLAAMRLPKDVQGLGACEYSLERGVV
HACHAGGVVHFLEGYTHHEVGAIDVDRIDVVWEAALRHGLRPV

### AP2/ERWEBP or AP2/ERF-Type Transcription Factor (Wrinkled)

[0325] In some embodiments, a composition described herein comprises a transgenic AP2/ERWEBP or AP2/ERF-type transcription factor. In some embodiments, a AP2/ERWEBP or AP2/ERF-type transcription factor is a WRINKLED protein.

[0326] In some embodiments, a AP2/ERWEBP or AP2/ERF-type transcription factor gene and/or transgene comprises a sequence encoding a peptide sequence that is at least 90%, 91%, 92%, 93%, 94%, 95%, 96%, 97%, 98%, 99%, or 100% identical to any one of SEQ ID NOs: 119, 121, 123, 125, 127, 129, 131, or 133 (or a portion thereof). In some embodiments, a AP2/ERWEBP or AP2/ERF-type transcription factor gene and/or transgene comprises a nucleotide sequence that is at least 90%, 91%, 92%, 93%, 94%, 95%, 96%, 97%, 98%, 99%, or 100% identical to any one of SEQ ID NOs: 118, 120, 122, 124, 126, 128, 130, or 132 (or a portion thereof).

-Exemplary Arabidopsis thaliana AP2/ERWEBP TF (Wrinkled 1 isoform
1) Nucleotide Coding Sequence
SEQ ID NO: 118
ATGAAGAAGCGCTTAACCACTTCCACTTGTTCTTCTTCTCCATCTTCCTCTGTTTCTTCTTCTA
CTACTACTTCCTCTCCTATTCAGTCGGAGGCTCCAAGGCCTAAACGAGCCAAAAGGGCTAAGAA
ATCTTCTCCTTCTGGTGATAAATCTCATAACCCGACAAGCCCTGCTTCTACCCGACGCAGCTCT
ATCTACAGAGGAGTCACTAGACATAGATGGACTGGGAGATTCGAGGCTCATCTTTGGGACAAAA
GCTCTTGGAATTCGATTCAGAACAAGAAAGGCAAACAAGTTTATCTGGGAGCATATGACAGTGA
AGAAGCAGCAGCACATACGTACGATCTGGCTGCTCTCAAGTACTGGGGACCCGACACCATCTTG
AATTTTCCGGCAGAGACGTACACAAAGGAATTGGAAGAAATGCAGAGAGTGACAAAGGAAGAAT
ATTTGGCTTCTCTCCGCCGCCAGAGCAGTGGTTTCTCCAGAGGCGTCTCTAAATATCGCGGCGT
CGCTAGGCATCACCACAACGGAAGATGGGAGGCTCGGATCGGAAGAGTGTTTGGGAACAAGTAC
TTGTACCTCGGCACCTATAATACGCAGGAGGAAGCTGCTGCAGCATATGACATGGCTGCGATTG
AGTATCGAGGCGCAAACGCGGTTACTAATTTCGACATTAGTAATTACATTGACCGGTTAAAGAA
GAAAGGTGTTTTCCCGTTCCCTGTGAACCAAGCTAACCATCAAGAGGGTATTCTTGTTGAAGCC
AAACAAGAAGTTGAAACGAGAGAAGCGAAGGAAGAGCCTAGAGAAGAAGTGAAACAACAGTACG
TGGAAGAACCACCGCAAGAAGAAGAAGAGAAGGAAGAAGAGAAAGCAGAGCAACAAGAAGCAGA
GATTGTAGGATATTCAGAAGAAGCAGCAGTGGTCAATTGCTGCATAGACTCTTCAACCATAATG
GAAATGGATCGTTGTGGGGACAACAATGAGCTGGCTTGGAACTTCTGTATGATGGATACAGGGT
TTTCTCCGTTTTTGACTGATCAGAATCTCGCGAATGAGAATCCCATAGAGTATCCGGAGCTATT
CAATGAGTTAGCATTTGAGGACAACATCGACTTCATGTTCGATGATGGGAAGCACGAGTGCTTG
AACTTGGAAAATCTGGATTGTTGCGTGGTGGGAAGAGAGAGCCCACCCTCTTCTTCTTCACCAT
TGTCTTGCTTATCTACTGACTCTGCTTCATCAACAACAACAACAACAACCTCGGTTTCTTGTAA
CTATTTGTTTCAGGGCTTGTTCGTTGGTTCTGAATAA
-Exemplary Arabidopsis thaliana AP2/ERWEBP TF (Wrinkled 1 isoform
1) Amino Acid Sequence
SEQ ID NO: 119
MKKRLTTSTCSSSPSSSVSSSTTTSSPIQSEAPRPKRAKRAKKSSPSGDKSHNPTSPASTRRSS
IYRGVTRHRWTGRFEAHLWDKSSWNSIQNKKGKQVYLGAYDSEEAAAHTYDLAALKYWGPDTIL
NFPAETYTKELEEMQRVTKEEYLASLRRQSSGFSRGVSKYRGVARHHHNGRWEARIGRVFGNKY
LYLGTYNTQEEAAAAYDMAAIEYRGANAVTNFDISNYIDRLKKKGVFPFPVNQANHQEGILVEA
KQEVETREAKEEPREEVKQQYVEEPPQEEEEKEEEKAEQQEAEIVGYSEEAAVVNCCIDSSTIM
EMDRCGDNNELAWNFCMMDTGFSPFLTDQNLANENPIEYPELFNELAFEDNIDEMEDDGKHECL
NLENLDCCVVGRESPPSSSSPLSCLSTDSASSTTTTTTSVSCNYLFQGLFVGSE
-Exemplary Arabidopsis thaliana AP2/ERWEBP TF (Wrinkled 1 isoform
2) Nucleotide Coding Sequence
SEQ ID NO: 120
ATGCAGAGAGTGACAAAGGAAGAATATTTGGCTTCTCTCCGCCGCCAGAGCAGTGGTTTCTCCA
GAGGCGTCTCTAAATATCGCGGCGTCGCTAGGCATCACCACAACGGAAGATGGGAGGCTCGGAT
CGGAAGAGTGTTTGGGAACAAGTACTTGTACCTCGGCACCTATAATACGCAGGAGGAAGCTGCT
GCAGCATATGACATGGCTGCGATTGAGTATCGAGGCGCAAACGCGGTTACTAATTTCGACATTA
GTAATTACATTGACCGGTTAAAGAAGAAAGGTGTTTTCCCGTTCCCTGTGAACCAAGCTAACCA
TCAAGAGGGTATTCTTGTTGAAGCCAAACAAGAAGTTGAAACGAGAGAAGCGAAGGAAGAGCCT
AGAGAAGAAGTGAAACAACAGTACGTGGAAGAACCACCGCAAGAAGAAGAAGAGAAGGAAGAAG
AGAAAGCAGAGCAACAAGAAGCAGAGATTGTAGGATATTCAGAAGAAGCAGCAGTGGTCAATTG
CTGCATAGACTCTTCAACCATAATGGAAATGGATCGTTGTGGGGACAACAATGAGCTGGCTTGG
AACTTCTGTATGATGGATACAGGGTTTTCTCCGTTTTTGACTGATCAGAATCTCGCGAATGAGA
ATCCCATAGAGTATCCGGAGCTATTCAATGAGTTAGCATTTGAGGACAACATCGACTTCATGTT
CGATGATGGGAAGCACGAGTGCTTGAACTTGGAAAATCTGGATTGTTGCGTGGTGGGAAGAGAG
AGCCCACCCTCTTCTTCTTCACCATTGTCTTGCTTATCTACTGACTCTGCTTCATCAACAACAA
CAACAACAACCTCGGTTTCTTGTAACTATTTGGTCTGA
-Exemplary Arabidopsis thaliana AP2/ERWEBP TF (Wrinkled 1 isoform
2) Amino Acid Sequence
SEQ ID NO: 121
MQRVTKEEYLASLRRQSSGFSRGVSKYRGVARHHHNGRWEARIGRVFGNKYLYLGTYNTQEEAA
AAYDMAAIEYRGANAVTNFDISNYIDRLKKKGVFPFPVNQANHQEGILVEAKQEVETREAKEEP
REEVKQQYVEEPPQEEEEKEEEKAEQQEAEIVGYSEEAAVVNCCIDSSTIMEMDRCGDNNELAW
NFCMMDTGFSPFLTDQNLANENPIEYPELFNELAFEDNIDFMEDDGKHECLNLENLDCCVVGRE
SPPSSSSPLSCLSTDSASSTTTTTTSVSCNYLV
-Exemplary Arabidopsis thaliana AP2/ERWEBP TF (Wrinkled 1 isoform
3) Nucleotide Coding Sequence
SEQ ID NO: 122
ATGAAGAAGCGCTTAACCACTTCCACTTGTTCTTCTTCTCCATCTTCCTCTGTTTCTTCTTCTA
CTACTACTTCCTCTCCTATTCAGTCGGAGGCTCCAAGGCCTAAACGAGCCAAAAGGGCTAAGAA
ATCTTCTCCTTCTGGTGATAAATCTCATAACCCGACAAGCCCTGCTTCTACCCGACGCAGCTCT
ATCTACAGAGGAGTCACTAGACATAGATGGACTGGGAGATTCGAGGCTCATCTTTGGGACAAAA
GCTCTTGGAATTCGATTCAGAACAAGAAAGGCAAACAAGTTTATCTGGGAGCATATGACAGTGA
AGAAGCAGCAGCACATACGTACGATCTGGCTGCTCTCAAGTACTGGGGACCCGACACCATCTTG
AATTTTCCGGCAGAGACGTACACAAAGGAATTGGAAGAAATGCAGAGAGTGACAAAGGAAGAAT
ATTTGGCTTCTCTCCGCCGCCAGAGCAGTGGTTTCTCCAGAGGCGTCTCTAAATATCGCGGCGT
CGCTAGGCATCACCACAACGGAAGATGGGAGGCTCGGATCGGAAGAGTGTTTGGGAACAAGTAC
TTGTACCTCGGCACCTATAATACGCAGGAGGAAGCTGCTGCAGCATATGACATGGCTGCGATTG
AGTATCGAGGCGCAAACGCGGTTACTAATTTCGACATTAGTAATTACATTGACCGGTTAAAGAA
GAAAGGTGTTTTCCCGTTCCCTGTGAACCAAGCTAACCATCAAGAGGGTATTCTTGTTGAAGCC
AAACAAGAAGTTGAAACGAGAGAAGCGAAGGAAGAGCCTAGAGAAGAAGTGAAACAACAGTACG
TGGAAGAACCACCGCAAGAAGAAGAAGAGAAGGAAGAAGAGAAAGCAGAGCAACAAGAAGCAGA
GATTGTAGGATATTCAGAAGAAGCAGCAGTGGTCAATTGCTGCATAGACTCTTCAACCATAATG
GAAATGGATCGTTGTGGGGACAACAATGAGCTGGCTTGGAACTTCTGTATGATGGATACAGGGT
TTTCTCCGTTTTTGACTGATCAGAATCTCGCGAATGAGAATCCCATAGAGTATCCGGAGCTATT
CAATGAGTTAGCATTTGAGGACAACATCGACTTCATGTTCGATGATGGGAAGCACGAGTGCTTG
AACTTGGAAAATCTGGATTGTTGCGTGGTGGGAAGAGAGAGCCCACCCTCTTCTTCTTCACCAT
TGTCTTGCTTATCTACTGACTCTGCTTCATCAACAACAACAACAACAACCTCGGTTTCTTGTAA
CTATTTGGTCTGA
-Exemplary Arabidopsis thaliana AP2/ERWEBP TF (Wrinkled 1 isoform
3) Amino Acid Sequence
SEQ ID NO: 123
MKKRLTTSTCSSSPSSSVSSSTTTSSPIQSEAPRPKRAKRAKKSSPSGDKSHNPTSPASTRRSS
IYRGVTRHRWTGRFEAHLWDKSSWNSIQNKKGKQVYLGAYDSEEAAAHTYDLAALKYWGPDTIL
NFPAETYTKELEEMQRVTKEEYLASLRRQSSGFSRGVSKYRGVARHHHNGRWEARIGRVFGNKY
LYLGTYNTQEEAAAAYDMAAIEYRGANAVTNFDISNYIDRLKKKGVFPFPVNQANHQEGILVEA
KQEVETREAKEEPREEVKQQYVEEPPQEEEEKEEEKAEQQEAEIVGYSEEAAVVNCCIDSSTIM
EMDRCGDNNELAWNFCMMDTGFSPFLTDQNLANENPIEYPELFNELAFEDNIDFMEDDGKHECL
NLENLDCCVVGRESPPSSSSPLSCLSTDSASSTTTTTTSVSCNYLV
-Exemplary Arabidopsis thaliana AP2/ERWEBP TF (Wrinkled 1 isoform
4 and isoform 5) Nucleotide Coding Sequence
SEQ ID NO: 124
ATGATTTTGTTTGTTTTAATAAAGATCTGGACTTTAACTGATAAATTTGGTTTCTTTGATCTGT
TGTTTGATCTCAACTTCGTCACAACTTCACCAGTTTATCTGGGAGCATATGACAGTGAAGAAGC
AGCAGCACATACGTACGATCTGGCTGCTCTCAAGTACTGGGGACCCGACACCATCTTGAATTTT
CCGGCAGAGACGTACACAAAGGAATTGGAAGAAATGCAGAGAGTGACAAAGGAAGAATATTTGG
CTTCTCTCCGCCGCCAGAGCAGTGGTTTCTCCAGAGGCGTCTCTAAATATCGCGGCGTCGCTAG
GCATCACCACAACGGAAGATGGGAGGCTCGGATCGGAAGAGTGTTTGGGAACAAGTACTTGTAC
CTCGGCACCTATAATACGCAGGAGGAAGCTGCTGCAGCATATGACATGGCTGCGATTGAGTATC
GAGGCGCAAACGCGGTTACTAATTTCGACATTAGTAATTACATTGACCGGTTAAAGAAGAAAGG
TGTTTTCCCGTTCCCTGTGAACCAAGCTAACCATCAAGAGGGTATTCTTGTTGAAGCCAAACAA
GAAGTTGAAACGAGAGAAGCGAAGGAAGAGCCTAGAGAAGAAGTGAAACAACAGTACGTGGAAG
AACCACCGCAAGAAGAAGAAGAGAAGGAAGAAGAGAAAGCAGAGCAACAAGAAGCAGAGATTGT
AGGATATTCAGAAGAAGCAGCAGTGGTCAATTGCTGCATAGACTCTTCAACCATAATGGAAATG
GATCGTTGTGGGGACAACAATGAGCTGGCTTGGAACTTCTGTATGATGGATACAGGGTTTTCTC
CGTTTTTGACTGATCAGAATCTCGCGAATGAGAATCCCATAGAGTATCCGGAGCTATTCAATGA
GTTAGCATTTGAGGACAACATCGACTTCATGTTCGATGATGGGAAGCACGAGTGCTTGAACTTG
GAAAATCTGGATTGTTGCGTGGTGGGAAGAGAGAGCCCACCCTCTTCTTCTTCACCATTGTCTT
GCTTATCTACTGACTCTGCTTCATCAACAACAACAACAACAACCTCGGTTTCTTGTAACTATTT
GGTCTGA
-Exemplary Arabidopsis thaliana AP2/ERWEBP TF (Wrinkled 1 isoform
4 and isoform 5) Amino Acid Sequence
SEQ ID NO: 125
MILFVLIKIWTLTDKFGFFDLLFDLNFVTTSPVYLGAYDSEEAAAHTYDLAALKYWGPDTILNF
PAETYTKELEEMQRVTKEEYLASLRRQSSGFSRGVSKYRGVARHHHNGRWEARIGRVFGNKYLY
LGTYNTQEEAAAAYDMAAIEYRGANAVTNFDISNYIDRLKKKGVFPFPVNQANHQEGILVEAKQ
EVETREAKEEPREEVKQQYVEEPPQEEEEKEEEKAEQQEAEIVGYSEEAAVVNCCIDSSTIMEM
DRCGDNNELAWNFCMMDTGFSPFLTDQNLANENPIEYPELFNELAFEDNIDFMEDDGKHECLNL
ENLDCCVVGRESPPSSSSPLSCLSTDSASSTTTTTTSVSCNYLV
-Exemplary Arabidopsis thaliana AP2/ERF-type transcriptional activator
(Wrinkled 4 isoform 1) Nucleotide Coding Sequence
SEQ ID NO: 126
ATGGCAAAAGTCTCTGGGAGGAGCAAGAAAACAATCGTTGACGATGAAATCAGCGATAAAACAG
CGTCTGCGTCTGAGTCTGCGTCCATTGCCTTAACATCCAAACGCAAACGTAAGTCGCCGCCTCG
AAACGCTCCTCTTCAACGCAGCTCCCCTTACAGAGGCGTCACAAGGCATAGATGGACTGGGAGA
TACGAAGCGCATTTGTGGGATAAGAACAGCTGGAACGATACACAGACCAAGAAAGGACGTCAAG
TTTATCTAGGGGCTTACGACGAAGAAGAAGCAGCAGCACGTGCCTACGACTTAGCAGCATTGAA
GTACTGGGGACGAGACACACTCTTGAACTTCCCTTTGCCGAGTTATGACGAAGACGTCAAAGAA
ATGGAAGGCCAATCCAAGGAAGAGTATATTGGATCATTGAGAAGAAAAAGTAGTGGATTTTCTC
GCGGTGTATCAAAATACAGAGGCGTTGCAAGGCATCACCATAATGGGAGATGGGAAGCTAGAAT
TGGAAGGGTGTTTGCCACGCAAGAAGAAGCAGCAATCGCCTACGACATCGCGGCAATAGAGTAC
CGTGGACTTAACGCCGTTACCAATTTCGACGTCAGCCGTTATCTAAACCCTAACGCCGCCGCGG
ATAAAGCCGATTCCGATTCTAAGCCCATTCGAAGCCCTAGTCGCGAGCCCGAATCGTCGGATGA
TAACAAATCTCCGAAATCAGAGGAAGTAATCGAACCATCTACATCGCCGGAAGTGATTCCAACT
CGCCGGAGCTTCCCCGACGATATCCAGACGTATTTTGGGTGTCAAGATTCCGGCAAGTTAGCGA
CTGAGGAAGACGTAATATTCGATTGTTTCAATTCTTATATAAATCCTGGCTTCTATAACGAGTT
TGATTATGGACCTTAA
-Exemplary Arabidopsis thaliana AP2/ERF-type transcriptional activator
(Wrinkled 4 isoform 1) Amino Acid Sequence
SEQ ID NO: 127
MAKVSGRSKKTIVDDEISDKTASASESASIALTSKRKRKSPPRNAPLQRSSPYRGVTRHRWTGR
YEAHLWDKNSWNDTQTKKGRQVYLGAYDEEEAAARAYDLAALKYWGRDTLLNFPLPSYDEDVKE
MEGQSKEEYIGSLRRKSSGFSRGVSKYRGVARHHHNGRWEARIGRVFATQEEAAIAYDIAAIEY
RGLNAVTNFDVSRYLNPNAAADKADSDSKPIRSPSREPESSDDNKSPKSEEVIEPSTSPEVIPT
RRSFPDDIQTYFGCQDSGKLATEEDVIFDCENSYINPGFYNEFDYGP
-Exemplary Arabidopsis thaliana AP2/ERF-type transcriptional activator
(Wrinkled 4 isoform 2) Nucleotide Coding Sequence
SEQ ID NO: 128
ATGGCAAAAGTCTCTGGGAGGAGCAAGAAAACAATCGTTGACGATGAAATCAGCGATAAAACAG
CGTCTGCGTCTGAGTCTGCGTCCATTGCCTTAACATCCAAACGCAAACGTAAGTCGCCGCCTCG
AAACGCTCCTCTTCAACGCAGCTCCCCTTACAGAGGCGTCACAAGGCATAGATGGACTGGGAGA
TACGAAGCGCATTTGTGGGATAAGAACAGCTGGAACGATACACAGACCAAGAAAGGACGTCAAG
TTTATCTAGGGGCTTACGACGAAGAAGAAGCAGCAGCACGTGCCTACGACTTAGCAGCATTGAA
GTACTGGGGACGAGACACACTCTTGAACTTCCCTTTGCCGAGTTATGACGAAGACGTCAAAGAA
ATGGAAGGCCAATCCAAGGAAGAGTATATTGGATCATTGAGAAGAAAAAGTAGTGGATTTTCTC
GCGGTGTATCAAAATACAGAGGCGTTGCAAGGCATCACCATAATGGGAGATGGGAAGCTAGAAT
TGGAAGGGTGTTTGGTAATAAATATCTATATCTTGGAACATACGCCACGCAAGAAGAAGCAGCA
ATCGCCTACGACATCGCGGCAATAGAGTACCGTGGACTTAACGCCGTTACCAATTTCGACGTCA
GCCGTTATCTAAACCCTAACGCCGCCGCGGATAAAGCCGATTCCGATTCTAAGCCCATTCGAAG
CCCTAGTCGCGAGCCCGAATCGTCGGATGATAACAAATCTCCGAAATCAGAGGAAGTAATCGAA
CCATCTACATCGCCGGAAGTGATTCCAACTCGCCGGAGCTTCCCCGACGATATCCAGACGTATT
TTGGGTGTCAAGATTCCGGCAAGTTAGCGACTGAGGAAGACGTAATATTCGATTGTTTCAATTC
TTATATAAATCCTGGCTTCTATAACGAGTTTGATTATGGACCTTAA
-Exemplary Arabidopsis thaliana AP2/ERF-type transcriptional activator
(Wrinkled 4 isoform 2) Amino Acid Sequence
SEQ ID NO: 129
MAKVSGRSKKTIVDDEISDKTASASESASIALTSKRKRKSPPRNAPLQRSSPYRGVTRHRWTGR
YEAHLWDKNSWNDTQTKKGRQVYLGAYDEEEAAARAYDLAALKYWGRDTLLNFPLPSYDEDVKE
MEGQSKEEYIGSLRRKSSGFSRGVSKYRGVARHHHNGRWEARIGRVFGNKYLYLGTYATQEEAA
IAYDIAAIEYRGLNAVTNFDVSRYLNPNAAADKADSDSKPIRSPSREPESSDDNKSPKSEEVIE
PSTSPEVIPTRRSFPDDIQTYFGCQDSGKLATEEDVIFDCENSYINPGFYNEFDYGP
-Exemplary Arabidopsis thaliana AP2/ERF-type transcriptional activator
(Wrinkled 4 isoform 3) Nucleotide Coding Sequence
SEQ ID NO: 130
ATGATGAATGCTGACTCATCAAGTGCAGTTTATCTAGGGGCTTACGACGAAGAAGAAGCAGCAG
CACGTGCCTACGACTTAGCAGCATTGAAGTACTGGGGACGAGACACACTCTTGAACTTCCCTTT
GCCGAGTTATGACGAAGACGTCAAAGAAATGGAAGGCCAATCCAAGGAAGAGTATATTGGATCA
TTGAGAAGAAAAAGTAGTGGATTTTCTCGCGGTGTATCAAAATACAGAGGCGTTGCAAGGCATC
ACCATAATGGGAGATGGGAAGCTAGAATTGGAAGGGTGTTTGGTAATAAATATCTATATCTTGG
AACATACGCCACGCAAGAAGAAGCAGCAATCGCCTACGACATCGCGGCAATAGAGTACCGTGGA
CTTAACGCCGTTACCAATTTCGACGTCAGCCGTTATCTAAACCCTAACGCCGCCGCGGATAAAG
CCGATTCCGATTCTAAGCCCATTCGAAGCCCTAGTCGCGAGCCCGAATCGTCGGATGATAACAA
ATCTCCGAAATCAGAGGAAGTAATCGAACCATCTACATCGCCGGAAGTGATTCCAACTCGCCGG
AGCTTCCCCGACGATATCCAGACGTATTTTGGGTGTCAAGATTCCGGCAAGTTAGCGACTGAGG
AAGACGTAATATTCGATTGTTTCAATTCTTATATAAATCCTGGCTTCTATAACGAGTTTGATTA
TGGACCTTAA
-Exemplary Arabidopsis thaliana AP2/ERF-type transcriptional activator
(Wrinkled 4 isoform 3) Amino Acid Sequence
SEQ ID NO: 131
MMNADSSSAVYLGAYDEEEAAARAYDLAALKYWGRDTLLNFPLPSYDEDVKEMEGQSKEEYIGS
LRRKSSGFSRGVSKYRGVARHHHNGRWEARIGRVFGNKYLYLGTYATQEEAAIAYDIAAIEYRG
LNAVTNFDVSRYLNPNAAADKADSDSKPIRSPSREPESSDDNKSPKSEEVIEPSTSPEVIPTRR
SFPDDIQTYFGCQDSGKLATEEDVIFDCFENSYINPGFYNEFDYGP
-Exemplary Arabidopsis thaliana AP2/ERF-type transcriptional activator
(Wrinkled 4 isoform 4) Nucleotide Coding Sequence
SEQ ID NO: 132
ATGAATTCCACCGAAATTGGGGCTTACGACGAAGAAGAAGCAGCAGCACGTGCCTACGACTTAG
CAGCATTGAAGTACTGGGGACGAGACACACTCTTGAACTTCCCTTTGCCGAGTTATGACGAAGA
CGTCAAAGAAATGGAAGGCCAATCCAAGGAAGAGTATATTGGATCATTGAGAAGAAAAAGTAGT
GGATTTTCTCGCGGTGTATCAAAATACAGAGGCGTTGCAAGGCATCACCATAATGGGAGATGGG
AAGCTAGAATTGGAAGGGTGTTTGGTAATAAATATCTATATCTTGGAACATACGCCACGCAAGA
AGAAGCAGCAATCGCCTACGACATCGCGGCAATAGAGTACCGTGGACTTAACGCCGTTACCAAT
TTCGACGTCAGCCGTTATCTAAACCCTAACGCCGCCGCGGATAAAGCCGATTCCGATTCTAAGC
CCATTCGAAGCCCTAGTCGCGAGCCCGAATCGTCGGATGATAACAAATCTCCGAAATCAGAGGA
AGTAATCGAACCATCTACATCGCCGGAAGTGATTCCAACTCGCCGGAGCTTCCCCGACGATATC
CAGACGTATTTTGGGTGTCAAGATTCCGGCAAGTTAGCGACTGAGGAAGACGTAATATTCGATT
GTTTCAATTCTTATATAAATCCTGGCTTCTATAACGAGTTTGATTATGGACCTTAA
-Exemplary Arabidopsis thaliana AP2/ERF-type transcriptional activator
(Wrinkled 4 isoform 4) Amino Acid Sequence
SEQ ID NO: 133
MNSTEIGAYDEEEAAARAYDLAALKYWGRDTLLNFPLPSYDEDVKEMEGQSKEEYIGSLRRKSS
GFSRGVSKYRGVARHHHNGRWEARIGRVFGNKYLYLGTYATQEEAAIAYDIAAIEYRGLNAVTN
FDVSRYLNPNAAADKADSDSKPIRSPSREPESSDDNKSPKSEEVIEPSTSPEVIPTRRSFPDDI
QTYFGCQDSGKLATEEDVIFDCFNSYINPGFYNEFDYGP

### Hd-ZIP IV Leucine Zipper TF (WOOLLY)

[0327] In some embodiments, a composition described herein comprises a transgenic HD-Zip IV transcription factor. Such a transcription factor, among other things, is known to positively regulate CER6 transcription (a multicellular trichome regulator).

[0328] In some embodiments, a HD-Zip IV transcription factor gene and/or transgene comprises a sequence encoding a peptide sequence that is at least 90%, 91%, 92%, 93%, 94%, 95%, 96%, 97%, 98%, 99%, or 100% identical to SEQ ID NO: 135 (or a portion thereof). In some embodiments, a HD-Zip IV transcription factor gene and/or transgene comprises a nucleotide sequence that is at least 90%, 91%, 92%, 93%, 94%, 95%, 96%, 97%, 98%, 99%, or 100% identical to SEQ ID NO: 134 (or a portion thereof).

-Exemplary Solanum lycopersicum HD-ZIP IV leucine zipper TF
(Woolly, aka Protodermal factor 2) Nucleic Acid Coding Sequence
SEQ ID NO: 134
ATGTTTAATAACCACCAGCACTTGCTCGATATATCGTCCTCAGCTCAACGAACACCTGATAACG
AGTTGGATTTCATTCGTGATGAAGAGTTTGATAGCAACTCTGGTGCTGATAACATGGAAGCTCC
CAATTCAGGTGATGACGATCAAGCTGATCCAAACCAACCTCCAAACAAGAAGAAGCGTTATCAT
CGCCACACTCAGAATCAGATTCAGGAAATGGAGTCCTTTTACAAGGAATGCAATCATCCAGATG
ACAAGCAAAGGAAGGAATTGGGAAGAAGACTTGGTTTGGAGCCATTACAAGTGAAATTTTGGTT
CCAGAACAAGCGTACTCAGATGAAGGCTCAACATGAGCGATGTGAGAACACACAGTTGAGGAAT
GAAAATGAGAAGCTTCGCGCTGAGAACATAAGGTACAAAGAAGCTTTGAGTAATGCAGCATGCC
CAAATTGTGGAGGGCCAGCAGCTATAGGAGAGATGTCATTTGATGAGCATCAGTTGAGGATTGA
AAATGCTCGTCTTAGAGATGAGATTGACAGGATAACTGGAATAGCTGGAAAGTATGTTGGTAAA
TCAGCCCTTGGATATTCTCATCAACTTCCTCTTCCTCAGCCCGAAGCTCCTCGGGTTCTGGATC
TTGCTTTTGGGCCTCAATCGGGCCTGCTTGGAGAAATGTACGCTGCTGGTGACCTTCTAAGAAC
TGCTGTTACGGGCCTTACAGATGCTGAGAAGCCCGTGGTCATTGAGCTTGCTGTTACTGCAATG
GAGGAACTTATAAGGATGGCTCAAACTGAAGAGCCATTATGGTTGCCAAGCTCAGGCTCTGAGA
CTTTATGTGAGCAAGAATATGCTCGTATTTTCCCTCGAGGCCTTGGACCTAAGCCAGCTACACT
CAATTCTGAAGCCTCACGAGAATCTGCTGTTGTGATTATGAATCATATCAATTTAGTTGAGATT
TTGATGGATGTGAACCAATGGACTACTGTTTTTGCTGGTCTGGTGTCAAAAGCAATGACTCTTG
AAGTCTTATCAACTGGTGTCGCAGGAAATCACAATGGAGCATTGCAAGTGATGACAGCAGAATT
TCAAGTTCCATCTCCACTTGTTCCAACTCGGGAGAACTATTTCTTAAGATACTGTAAACAACAT
GGTGAAGGGACTTGGGTAGTGGTTGATGTTTCCCTGGACAACTTGCGCACTGTTTCAGTTCCGC
GTTGCAGAAGAAGGCCATCTGGTTGTTTAATCCAAGAAATGCCAAATGGTTACTCAAGGGTTAT
ATGGGTTGAACACGTTGAGGTGGATGAAAATGCTGTCCATGACATCTACAAACCTCTTGTCAAT
TCTGGGATTGCATTTGGAGCAAAACGCTGGGTAGCAACTTTAGATAGACAATGTGAACGCCTTG
CAAGTGTGTTGGCGCTTAACATCCCAACAGGAGATGTTGGAATCATTACTAGTCCAGCTGGTCG
AAAGAGTATGCTAAAACTTGCTGAGAGAATGGTGATGAGCTTTTGTGCTGGAGTTGGTGCATCG
ACAACTCACATATGGACAACTTTGTCTGGAAGTGGTGCGGATGATGTTAGAGTCATGACTAGGA
AGAGTATCGATGATCCAGGGAGACCTCCTGGTATTGTGCTGAGTGCTGCAACATCTTTTTGGCT
TCCAGTTTCTCCTAAGAGAGTGTTTGATTTTCTCCGCGATGAGAACTCTAGAAATGAGTGGGAT
ATTCTTTCAAATGGTGGGATTGTTCAGGAAATGGCACACATTGCAAATGGTCGTGATCCAGGAA
ACTGTGTTTCTCTACTCCGTGTCAATACTGGAACAAACTCTAACCAGAGTAACATGCTGATACT
CCAAGAGAGCACAACTGATGTAACAGGATCTTACGTCATTTACGCTCCAGTTGATATTGCTGCA
ATGAACGTGGTGTTAGGTGGGGGTGACCCTGACTATGTTGCTCTGTTGCCATCTGGTTTTGCTA
TTCTTCCAGACGGACCGATGAATTATCATGGTGGAGGTAATTCAGAAATTGATTCTCCTGGTGG
ATCGCTACTAACTGTAGCATTTCAGATATTGGTTGATTCAGTCCCAACTGCAAAGCTTTCCCTT
GGCTCTGTTGCGACTGTTAATAGTCTCATCAAATGCACCGTTGAAAAGATCAAAGGTGCTGTAA
CTTCCGCAAATGCATGA
-Exemplary Solanum lycopersicum HD-ZIP IV leucine zipper TF (woolly
aka Protodermal factor 2) Amino Acid Sequence
SEQ ID NO: 135
MFNNHQHLLDISSSAQRTPDNELDFIRDEEFDSNSGADNMEAPNSGDDDQADPNQPPNKKKRYH
RHTQNQIQEMESFYKECNHPDDKQRKELGRRLGLEPLQVKFWFQNKRTQMKAQHERCENTQLRN
ENEKLRAENIRYKEALSNAACPNCGGPAAIGEMSFDEHQLRIENARLRDEIDRITGIAGKYVGK
SALGYSHQLPLPQPEAPRVLDLAFGPQSGLLGEMYAAGDLLRTAVTGLTDAEKPVVIELAVTAM
EELIRMAQTEEPLWLPSSGSETLCEQEYARIFPRGLGPKPATLNSEASRESAVVIMNHINLVEI
LMDVNQWTTVFAGLVSKAMTLEVLSTGVAGNHNGALQVMTAEFQVPSPLVPTRENYFLRYCKQH
GEGTWVVVDVSLDNLRTVSVPRCRRRPSGCLIQEMPNGYSRVIWVEHVEVDENAVHDIYKPLVN
SGIAFGAKRWVATLDRQCERLASVLALNIPTGDVGIITSPAGRKSMLKLAERMVMSFCAGVGAS
TTHIWTTLSGSGADDVRVMTRKSIDDPGRPPGIVLSAATSFWLPVSPKRVFDFLRDENSRNEWD
ILSNGGIVQEMAHIANGRDPGNCVSLLRVNTGTNSNQSNMLILQESTTDVTGSYVIYAPVDIAA
MNVVLGGGDPDYVALLPSGFAILPDGPMNYHGGGNSEIDSPGGSLLTVAFQILVDSVPTAKLSL
GSVATVNSLIKCTVEKIKGAVTSANA

### Modifying Trichome Development

[0329] The present disclosure recognizes that in certain embodiments, modified trichome development may be useful for altering pollutant uptake. In some embodiments, compositions and methods of the present disclosure comprise modified (e.g., increased) levels of trichome development and/or total number. In some embodiments, such a modification is facilitated through transgene introduction, gene knockdown, and/or gene knockout using materials and methods described herein.

### R2R3 MYB Transcription Factor (MYB123-Like)

[0330] In some embodiments, a composition described herein comprises a transgenic R2R3 MYB transcription factor. Such a protein, among other things, may regulate different biological processes, such as primary and secondary metabolism, responses to biotic and abiotic stresses, developmental processes, and hormonal responses.

[0331] In some embodiments, a R2R3 MYB transcription factor gene and/or transgene comprises a sequence encoding a peptide sequence that is at least 90%, 91%, 92%, 93%, 94%, 95%, 96%, 97%, 98%, 99%, or 100% identical to SEQ ID NO: 137 (or a portion thereof). In some embodiments, a R2R3 MYB transcription factor gene and/or transgene comprises a nucleotide sequence that is at least 90%, 91%, 92%, 93%, 94%, 95%, 96%, 97%, 98%, 99%, or 100% identical to SEQ ID NO: 136 (or a portion thereof).

-Exemplary Nicotiana tomentosiformis R2R3 MYB transcription factor
(MYB123-Like) Nucleic Acid Coding Sequence
SEQ ID NO: 136
ATGGGAAGAAAGCCTTGTTGTTCTAAAGAAGGATTAAACAAAGGGGCATGGACTCCTATGGAGG
ATAAAATTCTAATAGATTATATCAAAGTAAATGGTGAAGGGAAATGGAGAAATCTTCCCAAAAG
AGCTGGTCTTAAAAGATGTGGAAAGAGTTGCAGACTAAGGTGGCTGAATTATCTAAGGCCAGAC
ATTAAGAGGGGAAATATAACTCCAGATGAAGAAGATCTCATTATCAGACTTCATAAACTTCTTG
GAAATAGATGGTCTCTGATAGCTGGAAGGCTACCAGGACGAACAGACAATGAAATCAAGAATTA
TTGGAACACAAACATCGGCAAAAAACTACAACAAGGAGTTGCTCCTGGTCAGCCAAACCGCATA
ATATCTTCCATTAATCGTCAGCGCCCTCGTTCTAGTCATGCCAAATCTTCCAAGTCCGACCCAG
TTACCCAACCAAACAAAAATAATCAAGAACACACAGTTCCTAATCAGGATTCACATTATTTGCT
AACAGACGTTGGATTCGGAGGATCATCGTCTTCTTCATCCCCGTGTTTGGTTATCCGCACAAAG
GCAATTAGGTGCACTAAAGTTTTTATTACTCCTCCTCCTACTAGTAGTTCGGTTGCTGAGCCAC
AGAATGTTGATCAGTCTCACAATGAGATTGCTCAAAGGGCTAGTAATTCTCACTCAGTCTTCCC
ACCTTGCACCAGGAATCCCGTTGAGTTCTTACGCTTTCATGTTGACAACTCAATTCTTGATAAT
GATAACGATGACAAGGTAATGGCGGAGGATTTGACAATAGAAAATGCAAATACTATTGTAGCAT
CGTCCTCATCATCGTCATCATTATCAGTGTCATCTTTGTCCGAGCAGCAACAACCAATATCAGG
ATCAAAACCAACTTTCTATGGAGAATTGGAAAATTATAACTTTAATTTTATGTTTGGTTTTGAT
ATGGACGATCCTTTTCTTTCTGAGCTTCTAAATGCACCTGATATATGTGAAAACTTGGAGAATA
CAACTACTGTTGGAGATAGTTGCAGCAAAAACGAAAAGGAAAGGAGCTATTTCCCTTCGAATTA
TAGTCAAACAACATTGTTCGCAGAAGATACGCAACACAACGATTTGGAACTTTGGATTAATGGG
TTCTCCTCTTGA
-Exemplary Nicotiana tomentosiformis R2R3 MYB transcription factor
(MYB123-Like) Amino Acid Sequence
SEQ ID NO: 137
MGRKPCCSKEGLNKGAWTPMEDKILIDYIKVNGEGKWRNLPKRAGLKRCGKSCRLRWLNYLRPD
IKRGNITPDEEDLIIRLHKLLGNRWSLIAGRLPGRTDNEIKNYWNTNIGKKLQQGVAPGQPNRI
ISSINRQRPRSSHAKSSKSDPVTQPNKNNQEHTVPNQDSHYLLTDVGFGGSSSSSSPCLVIRTK
AICTKVFITPPPTSSSVAEPQNVDQSHNEIAQRASNSHSVFPPCTRNPVEFLRFHVDNSILDND
NDDKVMAEDLTIENANTIVASSSSSSSLSVSSLSEQQQPISGSKPTFYGELENYNFNFMFGFDM
DDPFLSELLNAPDICENLENTTTVGDSCSKNEKERSYFPSNYSQTTLFAEDTQHNDLELWINGF
SS

### GLABRA1

[0332] In some embodiments, a composition described herein comprises a transgenic GLABRA1), encoded by the gene GLI, that creates the protein Trichome Differentiation protein GL1 a Myb-like protein. Such a protein, among other things, may regulate trichome differentiation.

[0333] In some embodiments, a GLABRA1 gene and/or transgene comprises a sequence encoding a peptide sequence that is at least 90%, 91%, 92%, 93%, 94%, 95%, 96%, 97%, 98%, 99%, or 100% identical to SEQ ID NO: 139 (or a portion thereof). In some embodiments, a GLABRA1 gene and/or transgene comprises a nucleotide sequence that is at least 90%, 91%, 92%, 93%, 94%, 95%, 96%, 97%, 98%, 99%, or 100% identical to SEQ ID NO: 138 (or a portion thereof).

-Exemplary Arabidopsis thaliana Myb-like TF (Glabrous 1) Nucleic Acid
Coding Sequence
SEQ ID NO: 138
ATGAGAATAAGGAGAAGAGATGAAAAAGAGAATCAAGAATACAAGAAAGGTTTATGGACAGTTG
AAGAAGACAACATCCTTATGGACTATGTTCTTAATCATGGCACTGGCCAATGGAACCGCATCGT
CAGAAAAACTGGGCTAAAGAGATGTGGGAAAAGTTGTAGACTGAGATGGATGAATTATTTGAGC
CCTAATGTGAACAAAGGCAATTTCACTGAACAAGAAGAAGACCTCATTATTCGTCTCCACAAGC
TCCTCGGCAATAGATGGTCTTTGATAGCTAAAAGAGTACCGGGAAGAACAGATAACCAAGTCAA
GAACTACTGGAACACTCATCTCAGCAAAAAACTCGTCGGAGATTACTCCTCCGCCGTCAAAACC
ACCGGAGAAGACGACGACTCTCCACCGTCATTGTTCATCACTGCCGCCACACCTTCTTCTTGTC
ATCATCAACAAGAAAATATCTACGAGAATATAGCCAAGAGCTTTAACGGCGTCGTATCAGCTTC
GTACGAGGATAAACCAAAACAAGAACTGGCTCAAAAAGATGTCCTAATGGCAACTACTAATGAT
CCAAGTCACTATTATGGCAATAACGCTTTATGGGTTCATGACGACGATTTTGAGCTTAGTTCAC
TCGTAATGATGAATTTTGCTTCTGGTGATGTTGAGTACTGCCTTTAG
-Exemplary Arabidopsis thaliana Myb-like TF (Glabrous 1) Amino Acid
Sequence
SEQ ID NO: 139
MRIRRRDEKENQEYKKGLWTVEEDNILMDYVLNHGTGQWNRIVRKTGLKRCGKSCRLRWMNYLS
PNVNKGNFTEQEEDLIIRLHKLLGNRWSLIAKRVPGRTDNQVKNYWNTHLSKKLVGDYSSAVKT
TGEDDDSPPSLFITAATPSSCHHQQENIYENIAKSFNGVVSASYEDKPKQELAQKDVLMATTND
PSHYYGNNALWVHDDDFELSSLVMMNFASGDVEYCL

### GLABRA2

[0334] In some embodiments, a composition described herein comprises a transgenic GLABRA2, encoded by the gene GL2. In certain embodiments, such a protein is an HD-ZIP IV family of homeobox-leucine zipper protein with lipid-binding START domain-containing protein. Such a protein, among other things, may regulate trichome differentiation.

[0335] In some embodiments, a GLABRA2 gene and/or transgene comprises a sequence encoding a peptide sequence that is at least 90%, 91%, 92%, 93%, 94%, 95%, 96%, 97%, 98%, 99%, or 100% identical to any one of SEQ ID NOs: 141, 143, 145, 147, 149, or 151 (or a portion thereof). In some embodiments, a GLABRA2 gene and/or transgene comprises a nucleotide sequence that is at least 90%, 91%, 92%, 93%, 94%, 95%, 96%, 97%, 98%, 99%, or 100% identical to any one of SEQ ID NOs: 140, 142, 144, 146, 148, or 150 (or a portion thereof).

-Exemplary Arabidopsis thaliana HD-ZIP IV leucine zipper TF
(Glabrous 2 - Isoform 1) Nucleic Acid Coding Sequence
SEQ ID NO: 140
ATGAAGTCGATCGATGGCTGCCAATGCTGTAGCTGGCCATGTTTTAAACTACTCAATTCAAAGA
AGCTAGCTAGGGACAGGATTTGTATGTCAATGGCCGTCGACATGTCTTCCAAACAACCCACCAA
AGACTTTTTCTCCTCTCCAGCCCTCTCTCTATCTCTCGCTGGGATATTCCGGAATGCATCCTCC
GGCAGCACCAACCCTGAGGAGGATTTCCTGGGCAGAAGAGTAGTTGACGATGAGGATCGCACTG
TGGAGATGAGCAGCGAGAACTCAGGACCCACGAGATCCAGATCAGAGGAGGATTTGGAGGGTGA
GGATCACGACGATGAGGAGGAGGAAGAGGAGGACGGCGCAGCTGGAAACAAGGGCACTAATAAG
AGAAAGAGGAAGAAGTATCATCGTCACACCACCGATCAGATCAGACACATGGAAGCGCTATTCA
AAGAGACACCACATCCGGACGAGAAGCAAAGACAGCAGCTGAGCAAGCAACTAGGGCTGGCCCC
TCGCCAGGTCAAGTTCTGGTTCCAAAACCGCCGCACACAGATCAAGGCTATTCAAGAACGGCAC
GAGAACTCCCTGCTCAAGGCGGAACTAGAGAAGCTGCGAGAGGAAAACAAAGCCATGAGGGAGT
CTTTTTCCAAGGCTAATTCCTCCTGCCCCAACTGCGGAGGAGGCCCCGATGATCTCCACCTCGA
AAACTCCAAACTGAAAGCCGAGCTCGATAAGCTTCGTGCAGCTCTTGGACGCACTCCCTATCCC
CTGCAGGCTTCATGCTCCGACGATCAAGAACACCGTCTCGGCTCTCTCGATTTCTACACGGGCG
TCTTTGCCCTCGAGAAGTCCCGTATTGCCGAGATTTCTAACCGAGCCACCCTTGAACTCCAGAA
GATGGCCACCTCAGGCGAACCTATGTGGCTCCGCAGCGTTGAGACTGGCCGTGAGATTCTCAAC
TACGATGAGTACCTCAAGGAGTTTCCCCAAGCGCAAGCCTCTTCGTTTCCTGGAAGGAAAACCA
TCGAAGCATCTAGAGATGCGGGGATTGTGTTTATGGACGCACATAAACTTGCCCAGAGTTTCAT
GGACGTGGGACAATGGAAAGAGACATTTGCATGCTTGATCTCAAAGGCTGCAACGGTCGATGTT
ATCCGGCAAGGCGAAGGGCCTTCACGGATCGACGGGGCTATTCAGCTGATGTTCGGAGAGATGC
AGCTGCTCACTCCGGTCGTCCCCACAAGAGAAGTGTACTTCGTGAGAAGCTGCCGGCAGCTGAG
CCCTGAGAAATGGGCAATAGTGGACGTCTCGGTCTCCGTGGAGGACAGCAACACGGAGAAGGAG
GCTTCTCTTCTGAAATGTCGAAAACTCCCCTCCGGTTGCATCATCGAGGACACCTCCAACGGTC
ACTCCAAGGTCACCTGGGTGGAGCACCTCGACGTGTCTGCATCCACAGTTCAGCCTCTCTTCCG
CTCCTTAGTCAACACCGGTTTGGCCTTTGGGGCTCGACACTGGGTCGCCACCCTTCAGCTCCAT
TGCGAACGCCTTGTCTTCTTCATGGCTACCAACGTCCCCACCAAAGACTCTCTCGGAGTTACAA
CTCTTGCCGGGAGAAAGAGTGTGCTGAAGATGGCTCAGAGAATGACACAAAGCTTCTACCGCGC
CATTGCTGCATCAAGCTACCATCAATGGACCAAAATCACCACCAAAACTGGACAAGACATGCGG
GTTTCTTCCAGGAAGAACCTTCATGATCCTGGCGAGCCCACGGGAGTCATTGTCTGCGCTTCTT
CTTCGCTGTGGTTACCTGTTTCTCCAGCTCTTCTCTTCGATTTCTTTAGAGATGAAGCTCGTCG
GCATGAGTGGGATGCTTTGTCAAACGGAGCTCATGTTCAGTCTATTGCAAACTTATCCAAGGGA
CAAGACAGAGGCAACTCAGTGGCAATCCAGACAGTGAAATCGAGAGAAAAGAGCATATGGGTGC
TGCAAGACAGCAGCACTAACTCGTATGAGTCGGTGGTGGTATACGCTCCCGTAGATATAAACAC
GACACAGCTGGTGCTCGCGGGACATGATCCAAGCAACATCCAAATCCTCCCCTCTGGATTCTCA
ATCATACCTGATGGAGTAGAGTCACGGCCACTGGTAATAACGTCTACACAAGACGACAGAAACA
GCCAAGGAGGGTCGCTCCTGACACTCGCCCTCCAAACCCTCATCAACCCTTCTCCTGCAGCAAA
GCTGAATATGGAGTCTGTGGAATCCGTGACAAACCTCGTCTCAGTCACACTACACAACATTAAG
AGAAGTCTACAAATCGAAGATTGCTGA
-Exemplary Arabidopsis thaliana HD-ZIP IV leucine zipper TF
(Glabrous 2-Isoform 1) Amino Acid Sequence
SEQ ID NO: 141
MKSIDGCQCCSWPCFKLLNSKKLARDRICMSMAVDMSSKQPTKDFFSSPALSLSLAGIFRNASS
GSTNPEEDFLGRRVVDDEDRTVEMSSENSGPTRSRSEEDLEGEDHDDEEEEEEDGAAGNKGINK
RKRKKYHRHTTDQIRHMEALFKETPHPDEKQRQQLSKQLGLAPRQVKFWFQNRRTQIKAIQERH
ENSLLKAELEKLREENKAMRESFSKANSSCPNCGGGPDDLHLENSKLKAELDKLRAALGRTPYP
LQASCSDDQEHRLGSLDFYTGVFALEKSRIAEISNRATLELQKMATSGEPMWLRSVETGREILN
YDEYLKEFPQAQASSFPGRKTIEASRDAGIVFMDAHKLAQSFMDVGQWKETFACLISKAATVDV
IRQGEGPSRIDGAIQLMFGEMQLLTPVVPTREVYFVRSCRQLSPEKWAIVDVSVSVEDSNTEKE
ASLLKCRKLPSGCIIEDTSNGHSKVTWVEHLDVSASTVQPLFRSLVNTGLAFGARHWVATLQLH
CERLVFFMATNVPTKDSLGVTTLAGRKSVLKMAQRMTQSFYRAIAASSYHQWTKITTKTGQDMR
VSSRKNLHDPGEPTGVIVCASSSLWLPVSPALLFDFFRDEARRHEWDALSNGAHVQSIANLSKG
QDRGNSVAIQTVKSREKSIWVLQDSSTNSYESVVVYAPVDINTTQLVLAGHDPSNIQILPSGFS
IIPDGVESRPLVITSTQDDRNSQGGSLLTLALQTLINPSPAAKLNMESVESVINLVSVTLHNIK
RSLQIEDC
-Exemplary Arabidopsis thaliana HD-ZIP IV leucine zipper TF
(Glabrous 2-Isoform 2) Nucleic Acid Coding Sequence
SEQ ID NO: 142
ATGAGCAGCGAGAACTCAGGACCCACGAGATCCAGATCAGAGGAGGATTTGGAGGGTGAGGATC
ACGACGATGAGGAGGAGGAAGAGGAGGACGGCGCAGCTGGAAACAAGGGCACTAATAAGAGAAA
GAGGAAGAAGTATCATCGTCACACCACCGATCAGATCAGACACATGGAAGCGCTATTCAAAGAG
ACACCACATCCGGACGAGAAGCAAAGACAGCAGCTGAGCAAGCAACTAGGGCTGGCCCCTCGCC
AGGTCAAGTTCTGGTTCCAAAACCGCCGCACACAGATCAAGGCTATTCAAGAACGGCACGAGAA
CTCCCTGCTCAAGGCGGAACTAGAGAAGCTGCGAGAGGAAAACAAAGCCATGAGGGAGTCTTTT
TCCAAGGCTAATTCCTCCTGCCCCAACTGCGGAGGAGGCCCCGATGATCTCCACCTCGAAAACT
CCAAACTGAAAGCCGAGCTCGATAAGCTTCGTGCAGCTCTTGGACGCACTCCCTATCCCCTGCA
GGCTTCATGCTCCGACGATCAAGAACACCGTCTCGGCTCTCTCGATTTCTACACGGGCGTCTTT
GCCCTCGAGAAGTCCCGTATTGCCGAGATTTCTAACCGAGCCACCCTTGAACTCCAGAAGATGG
CCACCTCAGGCGAACCTATGTGGCTCCGCAGCGTTGAGACTGGCCGTGAGATTCTCAACTACGA
TGAGTACCTCAAGGAGTTTCCCCAAGCGCAAGCCTCTTCGTTTCCTGGAAGGAAAACCATCGAA
GCATCTAGAGATGCGGGGATTGTGTTTATGGACGCACATAAACTTGCCCAGAGTTTCATGGACG
TGGGACAATGGAAAGAGACATTTGCATGCTTGATCTCAAAGGCTGCAACGGTCGATGTTATCCG
GCAAGGCGAAGGGCCTTCACGGATCGACGGGGCTATTCAGCTGATGTTCGGAGAGATGCAGCTG
CTCACTCCGGTCGTCCCCACAAGAGAAGTGTACTTCGTGAGAAGCTGCCGGCAGCTGAGCCCTG
AGAAATGGGCAATAGTGGACGTCTCGGTCTCCGTGGAGGACAGCAACACGGAGAAGGAGGCTTC
TCTTCTGAAATGTCGAAAACTCCCCTCCGGTTGCATCATCGAGGACACCTCCAACGGTCACTCC
AAGGTCACCTGGGTGGAGCACCTCGACGTGTCTGCATCCACAGTTCAGCCTCTCTTCCGCTCCT
TAGTCAACACCGGTTTGGCCTTTGGGGCTCGACACTGGGTCGCCACCCTTCAGCTCCATTGCGA
ACGCCTTGTCTTCTTCATGGCTACCAACGTCCCCACCAAAGACTCTCTCGGAGTTACAACTCTT
GCCGGGAGAAAGAGTGTGCTGAAGATGGCTCAGAGAATGACACAAAGCTTCTACCGCGCCATTG
CTGCATCAAGCTACCATCAATGGACCAAAATCACCACCAAAACTGGACAAGACATGCGGGTTTC
TTCCAGGAAGAACCTTCATGATCCTGGCGAGCCCACGGGAGTCATTGTCTGCGCTTCTTCTTCG
CTGTGGTTACCTGTTTCTCCAGCTCTTCTCTTCGATTTCTTTAGAGATGAAGCTCGTCGGCATG
AGTGGGATGCTTTGTCAAACGGAGCTCATGTTCAGTCTATTGCAAACTTATCCAAGGGACAAGA
CAGAGGCAACTCAGTGGCAATCCAGACAGTGAAATCGAGAGAAAAGAGCATATGGGTGCTGCAA
GACAGCAGCACTAACTCGTATGAGTCGGTGGTGGTATACGCTCCCGTAGATATAAACACGACAC
AGCTGGTGCTCGCGGGACATGATCCAAGCAACATCCAAATCCTCCCCTCTGGATTCTCAATCAT
ACCTGATGGAGTAGAGTCACGGCCACTGGTAATAACGTCTACACAAGACGACAGAAACAGCCAA
GGAGGGTCGCTCCTGACACTCGCCCTCCAAACCCTCATCAACCCTTCTCCTGCAGCAAAGCTGA
ATATGGAGTCTGTGGAATCCGTGACAAACCTCGTCTCAGTCACACTACACAACATTAAGAGAAG
TCTACAAATCGAAGATTGCTGA
-Exemplary Arabidopsis thaliana HD-ZIP IV leucine zipper TF
(Glabrous 2-Isoform 2) Amino Acid Sequence
SEQ ID NO: 143
MSSENSGPTRSRSEEDLEGEDHDDEEEEEEDGAAGNKGTNKRKRKKYHRHTTDQIRHMEALFKE
TPHPDEKQRQQLSKQLGLAPRQVKFWFQNRRTQIKAIQERHENSLLKAELEKLREENKAMRESF
SKANSSCPNCGGGPDDLHLENSKLKAELDKLRAALGRTPYPLQASCSDDQEHRLGSLDFYTGVF
ALEKSRIAEISNRATLELQKMATSGEPMWLRSVETGREILNYDEYLKEFPQAQASSFPGRKTIE
ASRDAGIVFMDAHKLAQSFMDVGQWKETFACLISKAATVDVIRQGEGPSRIDGAIQLMFGEMQL
LTPVVPTREVYFVRSCRQLSPEKWAIVDVSVSVEDSNTEKEASLLKCRKLPSGCIIEDTSNGHS
KVTWVEHLDVSASTVQPLFRSLVNTGLAFGARHWVATLQLHCERLVFFMATNVPTKDSLGVTTL
AGRKSVLKMAQRMTQSFYRAIAASSYHQWTKITTKTGQDMRVSSRKNLHDPGEPTGVIVCASSS
LWLPVSPALLFDFFRDEARRHEWDALSNGAHVQSIANLSKGQDRGNSVAIQTVKSREKSIWVLQ
DSSTNSYESVVVYAPVDINTTQLVLAGHDPSNIQILPSGFSIIPDGVESRPLVITSTQDDRNSQ
GGSLLTLALQTLINPSPAAKLNMESVESVTNLVSVTLHNIKRSLQIEDC
-Exemplary Arabidopsis thaliana HD-ZIP IV leucine zipper TF
(Glabrous 2-Isoform 3) Nucleic Acid Coding Sequence
SEQ ID NO: 144
ATGTCAATGGCCGTCGACATGTCTTCCAAACAACCCACCAAAGACTTTTTCTCCTCTCCAGCCC
TCTCTCTATCTCTCGCTGGGATATTCCGGAATGCATCCTCCGGCAGCACCAACCCTGAGGAGGA
TTTCCTGGGCAGAAGAGTAGTTGACGATGAGGATCGCACTGTGGAGATGAGCAGCGAGAACTCA
GGACCCACGAGATCCAGATCAGAGGAGGATTTGGAGGGTGAGGATCACGACGATGAGGAGGAGG
AAGAGGAGGACGGCGCAGCTGGAAACAAGGGCACTAATAAGAGAAAGAGGAAGAAGTATCATCG
TCACACCACCGATCAGATCAGACACATGGAAGCGCTATTCAAAGAGACACCACATCCGGACGAG
AAGCAAAGACAGCAGCTGAGCAAGCAACTAGGGCTGGCCCCTCGCCAGGTCAAGTTCTGGTTCC
AAAACCGCCGCACACAGATCAAGGCTATTCAAGAACGGCACGAGAACTCCCTGCTCAAGGCGGA
ACTAGAGAAGCTGCGAGAGGAAAACAAAGCCATGAGGGAGTCTTTTTCCAAGGCTAATTCCTCC
TGCCCCAACTGCGGAGGAGGCCCCGATGATCTCCACCTCGAAAACTCCAAACTGAAAGCCGAGC
TCGATAAGCTTCGTGCAGCTCTTGGACGCACTCCCTATCCCCTGCAGGCTTCATGCTCCGACGA
TCAAGAACACCGTCTCGGCTCTCTCGATTTCTACACGGGCGTCTTTGCCCTCGAGAAGTCCCGT
ATTGCCGAGATTTCTAACCGAGCCACCCTTGAACTCCAGAAGATGGCCACCTCAGGCGAACCTA
TGTGGCTCCGCAGCGTTGAGACTGGCCGTGAGATTCTCAACTACGATGAGTACCTCAAGGAGTT
TCCCCAAGCGCAAGCCTCTTCGTTTCCTGGAAGGAAAACCATCGAAGCATCTAGAGATGCGGGG
ATTGTGTTTATGGACGCACATAAACTTGCCCAGAGTTTCATGGACGTGGGACAATGGAAAGAGA
CATTTGCATGCTTGATCTCAAAGGCTGCAACGGTCGATGTTATCCGGCAAGGCGAAGGGCCTTC
ACGGATCGACGGGGCTATTCAGCTGATGTTCGGAGAGATGCAGCTGCTCACTCCGGTCGTCCCC
ACAAGAGAAGTGTACTTCGTGAGAAGCTGCCGGCAGCTGAGCCCTGAGAAATGGGCAATAGTGG
ACGTCTCGGTCTCCGTGGAGGACAGCAACACGGAGAAGGAGGCTTCTCTTCTGAAATGTCGAAA
ACTCCCCTCCGGTTGCATCATCGAGGACACCTCCAACGGTCACTCCAAGGTCACCTGGGTGGAG
CACCTCGACGTGTCTGCATCCACAGTTCAGCCTCTCTTCCGCTCCTTAGTCAACACCGGTTTGG
CCTTTGGGGCTCGACACTGGGTCGCCACCCTTCAGCTCCATTGCGAACGCCTTGTCTTCTTCAT
GGCTACCAACGTCCCCACCAAAGACTCTCTCGGAGTTACAACTCTTGCCGGGAGAAAGAGTGTG
CTGAAGATGGCTCAGAGAATGACACAAAGCTTCTACCGCGCCATTGCTGCATCAAGCTACCATC
AATGGACCAAAATCACCACCAAAACTGGACAAGACATGCGGGTTTCTTCCAGGAAGAACCTTCA
TGATCCTGGCGAGCCCACGGGAGTCATTGTCTGCGCTTCTTCTTCGCTGTGGTTACCTGTTTCT
CCAGCTCTTCTCTTCGATTTCTTTAGAGATGAAGCTCGTCGGCATGAGTGGGATGCTTTGTCAA
ACGGAGCTCATGTTCAGTCTATTGCAAACTTATCCAAGGGACAAGACAGAGGCAACTCAGTGGC
AATCCAGACAGTGAAATCGAGAGAAAAGAGCATATGGGTGCTGCAAGACAGCAGCACTAACTCG
TATGAGTCGGTGGTGGTATACGCTCCCGTAGATATAAACACGACACAGCTGGTGCTCGCGGGAC
ATGATCCAAGCAACATCCAAATCCTCCCCTCTGGATTCTCAATCATACCTGATGGAGTAGAGTC
ACGGCCACTGGTAATAACGTCTACACAAGACGACAGAAACAGCCAAGGAGGGTCGCTCCTGACA
CTCGCCCTCCAAACCCTCATCAACCCTTCTCCTGCAGCAAAGCTGAATATGGAGTCTGTGGAAT
CCGTGACAAACCTCGTCTCAGTCACACTACACAACATTAAGAGAAGTCTACAAATCGAAGATTG
CTGA
-Exemplary Arabidopsis thaliana HD-ZIP IV leucine zipper TF
(Glabrous 2-Isoform 3) Amino Acid Sequence
SEQ ID NO: 145
MSMAVDMSSKQPTKDFFSSPALSLSLAGIFRNASSGSTNPEEDFLGRRVVDDEDRTVEMSSENS
GPTRSRSEEDLEGEDHDDEEEEEEDGAAGNKGTNKRKRKKYHRHTTDQIRHMEALFKETPHPDE
KQRQQLSKQLGLAPRQVKFWFQNRRTQIKAIQERHENSLLKAELEKLREENKAMRESFSKANSS
CPNCGGGPDDLHLENSKLKAELDKLRAALGRTPYPLQASCSDDQEHRLGSLDFYTGVFALEKSR
IAEISNRATLELQKMATSGEPMWLRSVETGREILNYDEYLKEFPQAQASSFPGRKTIEASRDAG
IVFMDAHKLAQSFMDVGQWKETFACLISKAATVDVIRQGEGPSRIDGAIQLMFGEMQLLTPVVP
TREVYFVRSCRQLSPEKWAIVDVSVSVEDSNTEKEASLLKCRKLPSGCIIEDTSNGHSKVTWVE
HLDVSASTVQPLFRSLVNTGLAFGARHWVATLQLHCERLVFFMATNVPTKDSLGVTTLAGRKSV
LKMAQRMTQSFYRAIAASSYHQWTKITTKTGQDMRVSSRKNLHDPGEPTGVIVCASSSLWLPVS
PALLFDFFRDEARRHEWDALSNGAHVQSIANLSKGQDRGNSVAIQTVKSREKSIWVLQDSSTNS
YESVVVYAPVDINTTQLVLAGHDPSNIQILPSGFSIIPDGVESRPLVITSTQDDRNSQGGSLLT
LALQTLINPSPAAKLNMESVESVTNLVSVTLHNIKRSLQIEDC
-Exemplary Arabidopsis thaliana HD-ZIP IV leucine zipper TF
(Glabrous 2-Isoform 4) Nucleic Acid Coding Sequence
SEQ ID NO: 146
ATGTCAATGGCCGTCGACATGTCTTCCAAACAACCCACCAAAGACTTTTTCTCCTCTCCAGCCC
TCTCTCTATCTCTCGCTGGGATATTCCGGAATGCATCCTCCGGCAGCACCAACCCTGAGGAGGA
TTTCCTGGGCAGAAGAGTAGTTGACGATGAGGATCGCACTGTGGAGATGAGCAGCGAGAACTCA
GGACCCACGAGATCCAGATCAGAGGAGGATTTGGAGGGTGAGGATCACGACGATGAGGAGGAGG
AAGAGGAGGACGGCGCAGCTGGAAACAAGGGCACTAATAAGAGAAAGAGGAAGAAGTATCATCG
TCACACCACCGATCAGATCAGACACATGGAAGCGCTATTCAAAGAGACACCACATCCGGACGAG
AAGCAAAGACAGCAGCTGAGCAAGCAACTAGGGCTGGCCCCTCGCCAGGTCAAGTTCTGGTTCC
AAAACCGCCGCACACAGATCAAGGCTATTCAAGAACGGCACGAGAACTCCCTGCTCAAGGCGGA
ACTAGAGAAGCTGCGAGAGGAAAACAAAGCCATGAGGGAGTCTTTTTCCAAGGCTAATTCCTCC
TGCCCCAACTGCGGAGGAGGCCCCGATGATCTCCACCTCGAAAACTCCAAACTGAAAGCCGAGC
TCGATAAGCTTCGTGCAGCTCTTGGACGCACTCCCTATCCCCTGCAGGCTTCATGCTCCGACGA
TCAAGAACACCGTCTCGGCTCTCTCGATTTCTACACGGGCGTCTTTGCCCTCGAGAAGTCCCGT
ATTGCCGAGATTTCTAACCGAGCCACCCTTGAACTCCAGAAGATGGCCACCTCAGGCGAACCTA
TGTGGCTCCGCAGCGTTGAGACTGGCCGTGAGATTCTCAACTACGATGAGTACCTCAAGGAGTT
TCCCCAAGCGCAAGCCTCTTCGTTTCCTGGAAGGAAAACCATCGAAGCATCTAGAGATGCGGGG
ATTGTGTTTATGGACGCACATAAACTTGCCCAGAGTTTCATGGACGTGGGACAATGGAAAGAGA
CATTTGCATGCTTGATCTCAAAGGCTGCAACGGTCGATGTTATCCGGCAAGGCGAAGGGCCTTC
ACGGATCGACGGGGCTATTCAGCTGATGTTCGGAGAGATGCAGCTGCTCACTCCGGTCGTCCCC
ACAAGAGAAGTGTACTTCGTGAGAAGCTGCCGGCAGCTGAGCCCTGAGAAATGGGCAATAGTGG
ACGTCTCGGTCTCCGTGGAGGACAGCAACACGGAGAAGGAGGCTTCTCTTCTGAAATGTCGAAA
ACTCCCCTCCGGTTGCATCATCGAGGACACCTCCAACGGTCACTCCAAGGTCACCTGGGTGGAG
CACCTCGACGTGTCTGCATCCACAGTTCAGCCTCTCTTCCGCTCCTTAGTCAACACCGGTTTGG
CCTTTGGGGCTCGACACTGGGTCGCCACCCTTCAGCTCCATTGCGAACGCCTTGTCTTCTTCAT
GGCTACCAACGTCCCCACCAAAGACTCTCTCGGAGTTACAACTCTTGCCGGGAGAAAGAGTGTG
CTGAAGATGGCTCAGAGAATGACACAAAGCTTCTACCGCGCCATTGCTGCATCAAGCTACCATC
AATGGACCAAAATCACCACCAAAACTGGACAAGACATGCGGGTTTCTTCCAGGAAGAACCTTCA
TGATCCTGGCGAGCCCACGGGAGTCATTGTCTGCGCTTCTTCTTCGCTGTGGTTACCTGTTTCT
CCAGCTCTTCTCTTCGATTTCTTTAGAGATGAAGCTCGTCGGCATGAGTGGGATGCTTTGTCAA
ACGGAGCTCATGTTCAGTCTATTGCAAACTTATCCAAGGGACAAGACAGAGGCAACTCAGTGGC
AATCCAGGTGCGTTTATTTTGTCTTCTCCTCCTCTAA
-Exemplary Arabidopsis thaliana HD-ZIP IV leucine zipper TF
(Glabrous 2-Isoform 4) Amino Acid Sequence
SEQ ID NO: 147
MSMAVDMSSKQPTKDFFSSPALSLSLAGIFRNASSGSTNPEEDFLGRRVVDDEDRIVEMSSENS
GPTRSRSEEDLEGEDHDDEEEEEEDGAAGNKGTNKRKRKKYHRHTTDQIRHMEALFKETPHPDE
KQRQQLSKQLGLAPRQVKFWFQNRRTQIKAIQERHENSLLKAELEKLREENKAMRESFSKANSS
CPNCGGGPDDLHLENSKLKAELDKLRAALGRTPYPLQASCSDDQEHRLGSLDFYTGVFALEKSR
IAEISNRATLELQKMATSGEPMWLRSVETGREILNYDEYLKEFPQAQASSFPGRKTIEASRDAG
IVFMDAHKLAQSFMDVGQWKETFACLISKAATVDVIRQGEGPSRIDGAIQLMFGEMQLLTPVVP
TREVYFVRSCRQLSPEKWAIVDVSVSVEDSNTEKEASLLKCRKLPSGCIIEDTSNGHSKVTWVE
HLDVSASTVQPLFRSLVNTGLAFGARHWVATLQLHCERLVFFMATNVPTKDSLGVTTLAGRKSV
LKMAQRMTQSFYRAIAASSYHQWTKITTKTGQDMRVSSRKNLHDPGEPTGVIVCASSSLWLPVS
PALLFDFFRDEARRHEWDALSNGAHVQSIANLSKGQDRGNSVAIQVRLFCLLLL
-Exemplary Arabidopsis thaliana HD-ZIP IV leucine zipper TF
(Glabrous 2-Isoform 5) Nucleic Acid Coding Sequence
SEQ ID NO: 148
ATGTCAATGGCCGTCGACATGTCTTCCAAACAACCCACCAAAGACTTTTTCTCCTCTCCAGCCC
TCTCTCTATCTCTCGCTGGGATATTCCGGAATGCATCCTCCGGCAGCACCAACCCTGAGGAGGA
TTTCCTGGGCAGAAGAGTAGTTGACGATGAGGATCGCACTGTGGAGATGAGCAGCGAGAACTCA
GGACCCACGAGATCCAGATCAGAGGAGGATTTGGAGGGTGAGGATCACGACGATGAGGAGGAGG
AAGAGGAGGACGGCGCAGCTGGAAACAAGGGCACTAATAAGAGAAAGAGGAAGAAGTATCATCG
TCACACCACCGATCAGATCAGACACATGGAAGCGCTATTCAAAGAGACACCACATCCGGACGAG
AAGCAAAGACAGCAGCTGAGCAAGCAACTAGGGCTGGCCCCTCGCCAGGTCAAGTTCTGGTTCC
AAAACCGCCGCACACAGATCAAGGCTATTCAAGAACGGCACGAGAACTCCCTGCTCAAGGCGGA
ACTAGAGAAGCTGCGAGAGGAAAACAAAGCCATGAGGGAGTCTTTTTCCAAGGCTAATTCCTCC
TGCCCCAACTGCGGAGGAGGCCCCGATGATCTCCACCTCGAAAACTCCAAACTGAAAGCCGAGC
TCGATAAGCTTCGTGCAGCTCTTGGACGCACTCCCTATCCCCTGCAGGCTTCATGCTCCGACGA
TCAAGAACACCGTCTCGGCTCTCTCGATTTCTACACGGGCGTCTTTGCCCTCGAGAAGTCCCGT
ATTGCCGAGATTTCTAACCGAGCCACCCTTGAACTCCAGAAGATGGCCACCTCAGGCGAACCTA
TGTGGCTCCGCAGCGTTGAGACTGGCCGTGAGATTCTCAACTACGATGAGTACCTCAAGGAGTT
TCCCCAAGCGCAAGCCTCTTCGTTTCCTGGAAGGAAAACCATCGAAGCATCTAGAGATGCGGGG
ATTGTGTTTATGGACGCACATAAACTTGCCCAGAGTTTCATGGACGTGGGACAATGGAAAGAGA
CATTTGCATGCTTGATCTCAAAGGCTGCAACGGTCGATGTTATCCGGCAAGGCGAAGGGCCTTC
ACGGATCGACGGGGCTATTCAGCTGATGTTCGGAGAGATGCAGCTGCTCACTCCGGTCGTCCCC
ACAAGAGAAGTGTACTTCGTGAGAAGCTGCCGGCAGCTGAGCCCTGAGAAATGGGCAATAGTGG
ACGTCTCGGTCTCCGTGGAGGACAGCAACACGGAGAAGGAGGCTTCTCTTCTGAAATGTCGAAA
ACTCCCCTCCGGTTGCATCATCGAGGACACCTCCAACGGTCACTCCAAGGTCACCTGGGTGGAG
CACCTCGACGTGTCTGCATCCACAGTTCAGCCTCTCTTCCGCTCCTTAGTCAACACCGGTTTGG
CCTTTGGGGCTCGACACTGGGTCGCCACCCTTCAGCTCCATTGCGAACGCCTTGTCTTCTTCAT
GGCTACCAACGTCCCCACCAAAGACTCTCTCGGTCCGTCTATATATCCGGATCCTCCATTTACA
CTCTCTATCTTTCTTTATATATAA
-Exemplary Arabidopsis thaliana HD-ZIP IV leucine zipper TF
(Glabrous 2-Isoform 5) Amino Acid Sequence
SEQ ID NO: 149
MSMAVDMSSKQPTKDFFSSPALSLSLAGIFRNASSGSTNPEEDFLGRRVVDDEDRIVEMSSENS
GPTRSRSEEDLEGEDHDDEEEEEEDGAAGNKGTNKRKRKKYHRHTTDQIRHMEALFKETPHPDE
KQRQQLSKQLGLAPRQVKFWFQNRRTQIKAIQERHENSLLKAELEKLREENKAMRESFSKANSS
CPNCGGGPDDLHLENSKLKAELDKLRAALGRTPYPLQASCSDDQEHRLGSLDFYTGVFALEKSR
IAEISNRATLELQKMATSGEPMWLRSVETGREILNYDEYLKEFPQAQASSFPGRKTIEASRDAG
IVFMDAHKLAQSFMDVGQWKETFACLISKAATVDVIRQGEGPSRIDGAIQLMFGEMQLLTPVVP
TREVYFVRSCRQLSPEKWAIVDVSVSVEDSNTEKEASLLKCRKLPSGCIIEDTSNGHSKVTWVE
HLDVSASTVQPLFRSLVNTGLAFGARHWVATLQLHCERLVFFMATNVPTKDSLGPSIYPDPPFT
LSIFLYI
-Exemplary Arabidopsis thaliana HD-ZIP IV leucine zipper TF
(Glabrous 2-Isoform 6) Nucleic Acid Coding Sequence
SEQ ID NO: 150
ATGAGCAGCGAGAACTCAGGACCCACGAGATCCAGATCAGAGGAGGATTTGGAGGGTGAGGATC
ACGACGATGAGGAGGAGGAAGAGGAGGACGGCGCAGCTGGAAACAAGGGCACTAATAAGAGAAA
GAGGAAGAAGTATCATCGTCACACCACCGATCAGATCAGACACATGGAAGCGCTATTCAAAGAG
ACACCACATCCGGACGAGAAGCAAAGACAGCAGCTGAGCAAGCAACTAGGGCTGGCCCCTCGCC
AGGTCAAGTTCTGGTTCCAAAACCGCCGCACACAGATCAAGGCTATTCAAGAACGGCACGAGAA
CTCCCTGCTCAAGGCGGAACTAGAGAAGCTGCGAGAGGAAAACAAAGCCATGAGGGAGTCTTTT
TCCAAGGCTAATTCCTCCTGCCCCAACTGCGGAGGAGGCCCCGATGATCTCCACCTCGAAAACT
CCAAACTGAAAGCCGAGCTCGATAAGCTTCGTGCAGCTCTTGGACGCACTCCCTATCCCCTGCA
GGCTTCATGCTCCGACGATCAAGAACACCGTCTCGGCTCTCTCGATTTCTACACGGGCGTCTTT
GCCCTCGAGAAGTCCCGTATTGCCGAGATTTCTAACCGAGCCACCCTTGAACTCCAGAAGATGG
CCACCTCAGGCGAACCTATGTGGCTCCGCAGCGTTGAGACTGGCCGTGAGATTCTCAACTACGA
TGAGTACCTCAAGGAGTTTCCCCAAGCGCAAGCCTCTTCGTTTCCTGGAAGGAAAACCATCGAA
GCATCTAGAGATGCGGGGATTGTGTTTATGGACGCACATAAACTTGCCCAGAGTTTCATGGACG
TGGGACAATGGAAAGAGACATTTGCATGCTTGATCTCAAAGGCTGCAACGGTCGATGTTATCCG
GCAAGGCGAAGGGCCTTCACGGATCGACGGGGCTATTCAGCTGATGTTCGGAGAGATGCAGCTG
CTCACTCCGGTCGTCCCCACAAGAGAAGTGTACTTCGTGAGAAGCTGCCGGCAGCTGAGCCCTG
AGAAATGGGCAATAGTGGACGTCTCGGTCTCCGTGGAGGACAGCAACACGGAGAAGGAGGCTTC
TCTTCTGAAATGTCGAAAACTCCCCTCCGGTTGCATCATCGAGGACACCTCCAACGGTCACTCC
AAGGTCACCTGGGTGGAGCACCTCGACGTGTCTGCATCCACAGTTCAGCCTCTCTTCCGCTCCT
TAGTCAACACCGGTTTGGCCTTTGGGGCTCGACACTGGGTCGCCACCCTTCAGCTCCATTGCGA
ACGCCTTGTCTTCTTCATGGCTACCAACGTCCCCACCAAAGACTCTCTCGGAGTTACAACTCTT
GCCGGGAGAAAGAGTGTGCTGAAGATGGCTCAGAGAATGACACAAAGCTTCTACCGCGCCATTG
CTGCATCAAGCTACCATCAATGGACCAAAATCACCACCAAAACTGGACAAGACATGCGGGTTTC
TTCCAGGAAGAACCTTCATGATCCTGGCGAGCCCACGGGAGTCATTGTCTGCGCTTCTTCTTCG
CTGTGGTTACCTGTTTCTCCAGCTCTTCTCTTCGATTTCTTTAGAGATGAAGCTCGTCGGCATG
AGTGGGATGCTTTGTCAAACGGAGCTCATGTTCAGTCTATTGCAAACTTATCCAAGGGACAAGA
CAGAGGCAACTCAGTGGCAATCCAGACAGTGAAATCGAGAGAAAAGAGCATATGGGTGCTGCAA
GACAGCAGCACTAACTCGTATGAGTCGGTGGTGGTATACGCTCCCGTAGATATAAACACGACAC
AGCTGGTGCTCGCGGGACATGATCCAAGCAACATCCAAATCCTCCCCTCTGGATTCTCAATCAT
ACCTGATGGAGTAGAGTCACGGCCACTGGTAATAACGTCTACACAAGACGACAGAAACAGCCAA
GGAGGGTCGCTCCTGACACTCGCCCTCCAAACCCTCATCAACCCTTCTCCTGCAGCAAAGCTGA
ATATGGAGTCTGTGGAATCCGTGACAAACCTCGTCTCAGTCACACTACACAACATTAAGAGAAG
TCTACAAATCGAAGATTGCTGA
-Exemplary Arabidopsis thaliana HD-ZIP IV leucine zipper TF
(Glabrous 2 - Isoform 6) Amino Acid Sequence
SEQ ID NO: 151
MSSENSGPTRSRSEEDLEGEDHDDEEEEEEDGAAGNKGTNKRKRKKYHRHTTDQIRHMEALFKE
TPHPDEKQRQQLSKQLGLAPRQVKFWFQNRRTQIKAIQERHENSLLKAELEKLREENKAMRESF
SKANSSCPNCGGGPDDLHLENSKLKAELDKLRAALGRTPYPLQASCSDDQEHRLGSLDFYTGVF
ALEKSRIAEISNRATLELQKMATSGEPMWLRSVETGREILNYDEYLKEFPQAQASSFPGRKTIE
ASRDAGIVFMDAHKLAQSFMDVGQWKETFACLISKAATVDVIRQGEGPSRIDGAIQLMFGEMQL
LTPVVPTREVYFVRSCRQLSPEKWAIVDVSVSVEDSNTEKEASLLKCRKLPSGCIIEDTSNGHS
KVTWVEHLDVSASTVQPLFRSLVNTGLAFGARHWVATLQLHCERLVFFMATNVPTKDSLGVTTL
AGRKSVLKMAQRMTQSFYRAIAASSYHQWTKITTKTGQDMRVSSRKNLHDPGEPTGVIVCASSS
LWLPVSPALLFDFFRDEARRHEWDALSNGAHVQSIANLSKGQDRGNSVAIQTVKSREKSIWVLQ
DSSTNSYESVVVYAPVDINTTQLVLAGHDPSNIQILPSGFSIIPDGVESRPLVITSTQDDRNSQ
GGSLLTLALQTLINPSPAAKLNMESVESVTNLVSVTLHNIKRSLQIEDC

### GLABRA3

[0336] In some embodiments, a composition described herein comprises a transgenic GLABRA3, encoded by the gene GL3. In some embodiments, such a protein, among other things, may regulate trichome differentiation.

[0337] In some embodiments, a GLABRA3 gene and/or transgene comprises a sequence encoding a peptide sequence that is at least 90%, 91%, 92%, 93%, 94%, 95%, 96%, 97%, 98%, 99%, or 100% identical to any one of SEQ ID NOs: 153, 155, or 157 (or a portion thereof). In some embodiments, a GLABRA3 gene and/or transgene comprises a nucleotide sequence that is at least 90%, 91%, 92%, 93%, 94%, 95%, 96%, 97%, 98%, 99%, or 100% identical to any one of SEQ ID NOs: 152, 154, or 156 (or a portion thereof).

-Exemplary Arabidopsis thaliana Basic Helix Loop Helix domain TF
(Glabrous 3 - Isoform 1) Nucleic Acid Coding Sequence
SEQ ID NO: 152
ATGGGATATAGGGATGAAGAAACAATGGCTACCGGACAAAACAGAACAACTGTGCCAGAGAATC
TGAAGAAACACCTCGCAGTTTCAGTTCGAAACATTCAATGGAGTTATGGTATCTTTTGGTCTGT
CTCTGCTTCTCAGTCTGGAGTTTTAGAATGGGGAGATGGATACTATAATGGAGATATCAAAACG
AGGAAGACGATTCAAGCTTCGGAGATCAAAGCTGATCAGCTTGGTCTACGGAGGAGCGAGCAGC
TTAGCGAGCTTTACGAGTCTCTCTCCGTCGCTGAATCTTCTTCTTCAGGCGTTGCTGCCGGATC
TCAAGTCACCAGACGAGCTTCCGCCGCCGCACTTTCACCGGAAGATCTCGCCGACACCGAGTGG
TACTATTTGGTTTGTATGTCTTTCGTCTTCAACATTGGTGAAGGAATGCCTGGACGGACGTTTG
CAAACGGTGAACCGATATGGTTGTGCAACGCTCATACGGCGGATAGTAAAGTGTTTAGCCGTTC
TCTTCTAGCAAAAAGTGCTGCGGTTAAGACAGTGGTTTGCTTCCCGTTCCTTGGAGGAGTCGTT
GAGATTGGTACCACAGAACATATTACGGAAGACATGAATGTAATACAATGCGTGAAGACATCAT
TCCTCGAAGCCCCTGATCCGTACGCTACAATATTACCAGCAAGATCCGATTATCACATCGACAA
CGTTCTTGATCCGCAACAGATTCTAGGCGACGAGATTTACGCGCCTATGTTCAGTACGGAGCCT
TTTCCAACAGCTTCTCCGAGCAGAACTACCAACGGTTTCGATCAAGAACATGAACAAGTAGCAG
ATGATCATGATTCTTTCATGACCGAAAGAATCACTGGAGGAGCTTCTCAGGTGCAAAGCTGGCA
GCTCATGGACGACGAGCTTAGTAACTGCGTTCACCAGTCGCTAAATTCCAGCGATTGCGTCTCT
CAAACGTTTGTTGAAGGGGCGGCTGGACGGGTTGCTTACGGTGCAAGAAAGAGTAGAGTTCAAA
GACTAGGGCAAATTCAAGAGCAACAGAGAAATGTGAAGACATTGTCATTTGATCCAAGAAACGA
CGACGTTCATTACCAAAGTGTGATCTCAACGATTTTTAAGACCAACCATCAGTTAATTCTCGGA
CCGCAGTTTCGAAACTGCGATAAACAGTCAAGCTTCACTAGGTGGAAGAAATCATCGTCATCAT
CATCAGGAACCGCCACGGTCACGGCACCATCACAAGGAATGTTAAAGAAAATTATTTTCGATGT
TCCGCGAGTGCACCAGAAAGAGAAGTTAATGTTGGACTCACCAGAAGCCAGAGATGAAACTGGG
AACCATGCGGTTTTAGAGAAGAAGCGCCGCGAGAAATTGAACGAACGGTTCATGACCTTGAGAA
AAATCATTCCGTCAATCAACAAGATCGATAAAGTATCGATTCTTGACGATACGATAGAGTATCT
TCAAGAACTCGAGAGACGGGTTCAAGAACTAGAATCTTGCAGAGAATCAACCGATACAGAGACT
CGTGGGACGATGACGATGAAGAGGAAGAAACCATGCGACGCAGGAGAAAGAACATCAGCTAATT
GCGCAAATAATGAAACAGGAAATGGGAAGAAGGTGTCGGTTAACAATGTTGGTGAAGCCGAGCC
AGCAGATACCGGTTTTACTGGTTTAACCGATAATTTAAGGATCGGTTCGTTTGGTAATGAGGTG
GTTATTGAGCTTAGATGTGCTTGGAGAGAAGGAGTATTGCTTGAGATAATGGATGTGATTAGTG
ATCTCCATTTGGATTCTCATTCGGTTCAATCCTCGACCGGAGACGGTTTGCTCTGCTTAACCGT
CAATTGCAAGCACAAGGGGTCAAAAATAGCGACACCAGGAATGATCAAAGAAGCACTTCAAAGG
GTTGCATGGATCTGTTGA
-Exemplary Arabidopsis thaliana Basic Helix Loop Helix domain TF
(Glabrous 3-Isoform 1) Amino Acid Sequence
SEQ ID NO: 153
MATGQNRTTVPENLKKHLAVSVRNIQWSYGIFWSVSASQSGVLEWGDGYYNGDIKTRKTIQASE
IKADQLGLRRSEQLSELYESLSVAESSSSGVAAGSQVTRRASAAALSPEDLADTEWYYLVCMSF
VFNIGEGMPGRTFANGEPIWLCNAHTADSKVFSRSLLAKSAAVKTVVCFPFLGGVVEIGTTEHI
TEDMNVIQCVKTSFLEAPDPYATILPARSDYHIDNVLDPQQILGDEIYAPMFSTEPFPTASPSR
TTNGFDQEHEQVADDHDSFMTERITGGASQVQSWQLMDDELSNCVHQSLNSSDCVSQTFVEGAA
GRVAYGARKSRVQRLGQIQEQQRNVKTLSFDPRNDDVHYQSVISTIFKINHQLILGPQFRNCDK
QSSFTRWKKSSSSSSGTATVTAPSQGMLKKIIFDVPRVHQKEKLMLDSPEARDETGNHAVLEKK
RREKLNERFMTLRKIIPSINKIDKVSILDDTIEYLQELERRVQELESCRESTDTETRGTMTMKR
KKPCDAGERTSANCANNETGNGKKVSVNNVGEAEPADTGFTGLTDNLRIGSFGNEVVIELRCAW
REGVLLEIMDVISDLHLDSHSVQSSTGDGLLCLTVNCKHKGSKIATPGMIKEALQRVAWIC
-Exemplary Arabidopsis thaliana Basic Helix Loop Helix domain TF
(Glabrous 3-Isoform 2) Nucleic Acid Coding Sequence
SEQ ID NO: 154
ATGGATGAAGAAACAATGGCTACCGGACAAAACAGAACAACTGTGCCAGAGAATCTGAAGAAAC
ACCTCGCAGTTTCAGTTCGAAACATTCAATGGAGTTATGGTATCTTTTGGTCTGTCTCTGCTTC
TCAGTCTGGAGTTTTAGAATGGGGAGATGGATACTATAATGGAGATATCAAAACGAGGAAGACG
ATTCAAGCTTCGGAGATCAAAGCTGATCAGCTTGGTCTACGGAGGAGCGAGCAGCTTAGCGAGC
TTTACGAGTCTCTCTCCGTCGCTGAATCTTCTTCTTCAGGCGTTGCTGCCGGATCTCAAGTCAC
CAGACGAGCTTCCGCCGCCGCACTTTCACCGGAAGATCTCGCCGACACCGAGTGGTACTATTTG
GTTTGTATGTCTTTCGTCTTCAACATTGGTGAAGGAATGCCTGGACGGACGTTTGCAAACGGTG
AACCGATATGGTTGTGCAACGCTCATACGGCGGATAGTAAAGTGTTTAGCCGTTCTCTTCTAGC
AAAAAGTGCTGCGGTTAAGACAGTGGTTTGCTTCCCGTTCCTTGGAGGAGTCGTTGAGATTGGT
ACCACAGAACATATTACGGAAGACATGAATGTAATACAATGCGTGAAGACATCATTCCTCGAAG
CCCCTGATCCGTACGCTACAATATTACCAGCAAGATCCGATTATCACATCGACAACGTTCTTGA
TCCGCAACAGATTCTAGGCGACGAGATTTACGCGCCTATGTTCAGTACGGAGCCTTTTCCAACA
GCTTCTCCGAGCAGAACTACCAACGGTTTCGATCAAGAACATGAACAAGTAGCAGATGATCATG
ATTCTTTCATGACCGAAAGAATCACTGGAGGAGCTTCTCAGGTGCAAAGCTGGCAGCTCATGGA
CGACGAGCTTAGTAACTGCGTTCACCAGTCGCTAAATTCCAGCGATTGCGTCTCTCAAACGTTT
GTTGAAGGGGCGGCTGGACGGGTTGCTTACGGTGCAAGAAAGAGTAGAGTTCAAAGACTAGGGC
AAATTCAAGAGCAACAGAGAAATGTGAAGACATTGTCATTTGATCCAAGAAACGACGACGTTCA
TTACCAAAGTGTGATCTCAACGATTTTTAAGACCAACCATCAGTTAATTCTCGGACCGCAGTTT
CGAAACTGCGATAAACAGTCAAGCTTCACTAGGTGGAAGAAATCATCGTCATCATCATCAGGAA
CCGCCACGGTCACGGCACCATCACAAGGAATGTTAAAGAAAATTATTTTCGATGTTCCGCGAGT
GCACCAGAAAGAGAAGTTAATGTTGGACTCACCAGAAGCCAGAGATGAAACTGGGAACCATGCG
GTTTTAGAGAAGAAGCGCCGCGAGAAATTGAACGAACGGTTCATGACCTTGAGAAAAATCATTC
CGTCAATCAACAAGATCGATAAAGTATCGATTCTTGACGATACGATAGAGTATCTTCAAGAACT
CGAGAGACGGGTTCAAGAACTAGAATCTTGCAGAGAATCAACCGATACAGAGACTCGTGGGACG
ATGACGATGAAGAGGAAGAAACCATGCGACGCAGGAGAAAGAACATCAGCTAATTGCGCAAATA
ATGAAACAGGAAATGGGAAGAAGGTGTCGGTTAACAATGTTGGTGAAGCCGAGCCAGCAGATAC
CGGTTTTACTGGTTTAACCGATAATTTAAGGATCGGTTCGTTTGGTAATGAGGTGGTTATTGAG
CTTAGATGTGCTTGGAGAGAAGGAGTATTGCTTGAGATAATGGATGTGATTAGTGATCTCCATT
TGGATTCTCATTCGGTTCAATCCTCGACCGGAGACGGTTTGCTCTGCTTAACCGTCAATTGCAA
GCACAAGGGGTCAAAAATAGCGACACCAGGAATGATCAAAGAAGCACTTCAAAGGGTTGCATGG
ATCTGTTGA
-Exemplary Arabidopsis thaliana Basic Helix Loop Helix domain TF
(Glabrous 3-Isoform 2) Amino Acid Sequence
SEQ ID NO: 155
MDEETMATGQNRTTVPENLKKHLAVSVRNIQWSYGIFWSVSASQSGVLEWGDGYYNGDIKTRKT
IQASEIKADQLGLRRSEQLSELYESLSVAESSSSGVAAGSQVTRRASAAALSPEDLADTEWYYL
VCMSFVFNIGEGMPGRTFANGEPIWLCNAHTADSKVFSRSLLAKSAAVKTVVCFPFLGGVVEIG
TTEHITEDMNVIQCVKTSFLEAPDPYATILPARSDYHIDNVLDPQQILGDEIYAPMFSTEPFPT
ASPSRTTNGFDQEHEQVADDHDSFMTERITGGASQVQSWQLMDDELSNCVHQSLNSSDCVSQTF
VEGAAGRVAYGARKSRVQRLGQIQEQQRNVKTLSFDPRNDDVHYQSVISTIFKINHQLILGPQF
RNCDKQSSFTRWKKSSSSSSGTATVTAPSQGMLKKIIFDVPRVHQKEKLMLDSPEARDETGNHA
VLEKKRREKLNERFMTLRKIIPSINKIDKVSILDDTIEYLQELERRVQELESCRESTDTETRGT
MTMKRKKPCDAGERTSANCANNETGNGKKVSVNNVGEAEPADTGFTGLIDNLRIGSFGNEVVIE
LRCAWREGVLLEIMDVISDLHLDSHSVQSSTGDGLLCLTVNCKHKGSKIATPGMIKEALQRVAW
IC
-Exemplary Arabidopsis thaliana Basic Helix Loop Helix domain TF
(Glabrous 3-Isoform 3) Nucleic Acid Coding Sequence
SEQ ID NO: 156
ATGGCTACCGGACAAAACAGAACAACTGTGCCAGAGAATCTGAAGAAACACCTCGCAGTTTCAG
TTCGAAACATTCAATGGAGTTATGGTATCTTTTGGTCTGTCTCTGCTTCTCAGTCTGGAGTTTT
AGAATGGGGAGATGGATACTATAATGGAGATATCAAAACGAGGAAGACGATTCAAGCTTCGGAG
ATCAAAGCTGATCAGCTTGGTCTACGGAGGAGCGAGCAGCTTAGCGAGCTTTACGAGTCTCTCT
CCGTCGCTGAATCTTCTTCTTCAGGCGTTGCTGCCGGATCTCAAGTCACCAGACGAGCTTCCGC
CGCCGCACTTTCACCGGAAGATCTCGCCGACACCGAGTGGTACTATTTGGTTTGTATGTCTTTC
GTCTTCAACATTGGTGAAGGAATGCCTGGACGGACGTTTGCAAACGGTGAACCGATATGGTTGT
GCAACGCTCATACGGCGGATAGTAAAGTGTTTAGCCGTTCTCTTCTAGCAAAAAGTGCTGCGGT
TAAGACAGTGGTTTGCTTCCCGTTCCTTGGAGGAGTCGTTGAGATTGGTACCACAGAACATATT
ACGGAAGACATGAATGTAATACAATGCGTGAAGACATCATTCCTCGAAGCCCCTGATCCGTACG
CTACAATATTACCAGCAAGATCCGATTATCACATCGACAACGTTCTTGATCCGCAACAGATTCT
AGGCGACGAGATTTACGCGCCTATGTTCAGTACGGAGCCTTTTCCAACAGCTTCTCCGAGCAGA
ACTACCAACGGTTTCGATCAAGAACATGAACAAGTAGCAGATGATCATGATTCTTTCATGACCG
AAAGAATCACTGGAGGAGCTTCTCAGGTGCAAAGCTGGCAGCTCATGGACGACGAGCTTAGTAA
CTGCGTTCACCAGTCGCTAAATTCCAGCGATTGCGTCTCTCAAACGTTTGTTGAAGGGGCGGCT
GGACGGGTTGCTTACGGTGCAAGAAAGAGTAGAGTTCAAAGACTAGGGCAAATTCAAGAGCAAC
AGAGAAATGTGAAGACATTGTCATTTGATCCAAGAAACGACGACGTTCATTACCAAAGTGTGAT
CTCAACGATTTTTAAGACCAACCATCAGTTAATTCTCGGACCGCAGTTTCGAAACTGCGATAAA
CAGTCAAGCTTCACTAGGTGGAAGAAATCATCGTCATCATCATCAGGAACCGCCACGGTCACGG
CACCATCACAAGGAATGTTAAAGAAAATTATTTTCGATGTTCCGCGAGTGCACCAGAAAGAGAA
GTTAATGTTGGACTCACCAGAAGCCAGAGATGAAACTGGGAACCATGCGGTTTTAGAGAAGAAG
CGCCGCGAGAAATTGAACGAACGGTTCATGACCTTGAGAAAAATCATTCCGTCAATCAACAAGA
TCGATAAAGTATCGATTCTTGACGATACGATAGAGTATCTTCAAGAACTCGAGAGACGGGTTCA
AGAACTAGAATCTTGCAGAGAATCAACCGATACAGAGACTCGTGGGACGATGACGATGAAGAGG
AAGAAACCATGCGACGCAGGAGAAAGAACATCAGCTAATTGCGCAAATAATGAAACAGGAAATG
GGAAGAAGGTGTCGGTTAACAATGTTGGTGAAGCCGAGCCAGCAGATACCGGTTTTACTGGTTT
AACCGATAATTTAAGGATCGGTTCGTTTGGTAATGAGGTGGTTATTGAGCTTAGATGTGCTTGG
AGAGAAGGAGTATTGCTTGAGATAATGGATGTGATTAGTGATCTCCATTTGGATTCTCATTCGG
TTCAATCCTCGACCGGAGACGGTTTGCTCTGCTTAACCGTCAATTGCAAGCACAAGGGGTCAAA
AATAGCGACACCAGGAATGATCAAAGAAGCACTTCAAAGGGTTGCATGGATCTGTTGA
-Exemplary Arabidopsis thaliana Basic Helix Loop Helix domain TF
(Glabrous 3-Isoform 3) Amino Acid Sequence
SEQ ID NO: 157
MATGQNRTTVPENLKKHLAVSVRNIQWSYGIFWSVSASQSGVLEWGDGYYNGDIKTRKTIQASE
IKADQLGLRRSEQLSELYESLSVAESSSSGVAAGSQVTRRASAAALSPEDLADTEWYYLVCMSF
VFNIGEGMPGRTFANGEPIWLCNAHTADSKVFSRSLLAKSAAVKTVVCFPFLGGVVEIGTTEHI
TEDMNVIQCVKTSFLEAPDPYATILPARSDYHIDNVLDPQQILGDEIYAPMFSTEPFPTASPSR
TTNGFDQEHEQVADDHDSFMTERITGGASQVQSWQLMDDELSNCVHQSLNSSDCVSQTFVEGAA
GRVAYGARKSRVQRLGQIQEQQRNVKTLSFDPRNDDVHYQSVISTIFKINHQLILGPQFRNCDK
QSSFTRWKKSSSSSSGTATVTAPSQGMLKKIIFDVPRVHQKEKLMLDSPEARDETGNHAVLEKK
RREKLNERFMTLRKIIPSINKIDKVSILDDTIEYLQELERRVQELESCRESTDTETRGTMTMKR
KKPCDAGERTSANCANNETGNGKKVSVNNVGEAEPADTGFTGLIDNLRIGSFGNEVVIELRCAW
REGVLLEIMDVISDLHLDSHSVQSSTGDGLLCLTVNCKHKGSKIATPGMIKEALQRVAWIC

### C2H2-Type Domain-Containing Protein (HAIR)

[0338] In some embodiments, a composition described herein comprises a transgenic C2H2 zing finger transcription factor encoding a HAIR protein. In some embodiments, a HAIR protein is encoded by the gene 104644359. In some embodiments, such a protein, among other things, may regulate trichome differentiation. In some embodiments, such a protein may heterodimerize with the transcription factor woolly.

[0339] In some embodiments, a HAIR protein encoding gene and/or transgene comprises a sequence encoding a peptide sequence that is at least 90%, 91%, 92%, 93%, 94%, 95%, 96%, 97%, 98%, 99%, or 100% identical to SEQ ID NO: 159 (or a portion thereof). In some embodiments, a HAIR protein encoding gene and/or transgene comprises a nucleotide sequence that is at least 90%, 91%, 92%, 93%, 94%, 95%, 96%, 97%, 98%, 99%, or 100% identical to SEQ ID NO:158 (or a portion thereof).

-Exemplary Solanum lycopersicum C2H2 zinc finger Transcription factor
(SL-Hair) Nucleic Acid Coding Sequence
SEQ ID NO: 158
ATGGAGAAGATTGGAAGAGAAGCTGTTGATTACATGAATATGAAGTCTTTCTCTCAACCCCTTA
GAAAAAAATCCATTAGACTTTTTGGTAAAGAATTTAGTGTTGGTGATAGTACTAACATGTCTGA
ATCAACTGATAAAAATCCTTTGCATCATGAACCTAAACCAAATACGATGAGTATCTCCGCGAAT
CGTATCGATAAAACAGGTCATGTTGATGAAATCAGCAGGAAATATGAATGTTACTATTGTTTTA
GGAGCTTTCCAACTTCTCAAGCTTTAGGAGGCCATCAAAATGCACACAAGAAAGAAAGACAAAA
TGCCAAACTATCTCATCTTCAGTCTTCAATAGTGCATGAGACGAACCGTAATAGATTTGGTGAA
CCATCCACTGCAGCTACAAGATTAACTCATTATCATTCAACATGGAGCAACATTAACAATAATA
ATGTTTATAGTCCTAATTACAATGAAGCATTTTGGCAAATTCCTCCAACAATTCATCATTATCA
GAATAATATTAATCCTCCATCTTCTTTTTCTCATGACTCATTTTTTCCTAATGATGAAGAGAAG
AGGGAAGTACAAAATCATGTGAGTTTAGATTTGCACTTATAA
-Exemplary Solanum lycopersicum C2H2 zinc finger Transcription factor
(SL-Hair) Amino Acid Sequence
SEQ ID NO: 159
MEKIGREAVDYMNMKSFSQPLRKKSIRLFGKEFSVGDSTNMSESTDKNPLHHEPKPNTMSISAN
RIDKTGHVDEISRKYECYYCFRSFPTSQALGGHQNAHKKERQNAKLSHLQSSIVHETNRNRFGE
PSTAATRLTHYHSTWSNINNNNVYSPNYNEAFWQIPPTIHHYQNNINPPSSFSHDSFFPNDEEK
REVQNHVSLDLHL

Modifying and/or Expressing Specific Transporter Channels

[0340] The present disclosure recognizes that in certain embodiments, formate uptake transmembrane transporters may be of particular usefulness for increasing indoor air quality. In some embodiments, formate uptake transmembrane transporters may facilitate active transport of formaldehyde. In some embodiments, formaldehyde uptake is mediated by formaldehyde specific transporters. In some embodiments, technologies described herein comprise transgenic expression of a formate transporter. In some embodiments, technologies described herein comprise transgenic expression of a formate transporter that has undergone directed evolution to increase specificity for formaldehyde. In some embodiments, technologies described herein comprise transgenic expression of a formaldehyde specific transporter.

[0341] The present disclosure recognizes that in certain embodiments, BTEX uptake transmembrane transporters may be of particular usefulness for increasing indoor air quality. In some embodiments, BTEX uptake transmembrane transporters may facilitate active transport of BTEX from an environment. In some embodiments, BTEX uptake is mediated by BTEX specific transporters. In some embodiments, technologies described herein comprise transgenic expression of a BTEX transporter. In some embodiments, technologies described herein comprise transgenic expression of a BTEX transporter that has undergone directed evolution to increase specificity for BTEX.

[0342] In some embodiments, compositions and methods of the present disclosure comprise modified (e.g., increased) levels of certain heterologous protein membrane transporters. In some embodiments, such a modification is facilitated through transgene introduction using materials and methods described herein.

### Oxalate: Formate Antiport Proteins

[0343] In some embodiments, a composition described herein comprises a transgenic Formate/oxalate Major Facilitator Family (MFS) antitransporter protein. In some embodiments, Formate/oxalate MFS antitransporter protein is encoded by the gene MFS. In some embodiments, such a protein, among other things, may participate in active transport of formate and/or formaldehyde.

[0344] In some embodiments, a Formate/oxalate MFS antitransporter protein encoding gene and/or transgene comprises a sequence encoding a peptide sequence that is at least 90%, 91%, 92%, 93%, 94%, 95%, 96%, 97%, 98%, 99%, or 100% identical to any one of SEQ ID NOs: 161, 163, or 165 (or a portion thereof). In some embodiments, a Formate/oxalate MFS antitransporter protein encoding gene and/or transgene comprises a nucleotide sequence that is at least 90%, 91%, 92%, 93%, 94%, 95%, 96%, 97%, 98%, 99%, or 100% identical to any one of SEQ ID NOs: 160, 162, or 164 (or a portion thereof).

-Exemplary Oxalobacter formigenes Formate/oxalate MFS antiporter
(MFS of) Nucleic Acid Coding Sequence
SEQ ID NO: 160
ATGAATAATCCACAAACAGGACAATCAACAGGCCTCTTGGGCAATCGTTGGTTCTACTTGGTAT
TAGCAGTTTTGCTGATGTGTATGATCTCGGGTGTCCAATATTCCTGGACACTGTACGCTAACCC
GGTTAAAGACAACCTTGGCGTTTCTTTGGCTGCGGTTCAGACGGCTTTCACACTCTCTCAGGTC
ATTCAAGCTGGTTCTCAGCCTGGTGGTGGTTACTTCGTTGATAAATTCGGTCCAAGAATTCCAT
TGATGTTCGGTGGTGCGATGGTTCTCGCTGGCTGGACCTTCATGGGTATGGTTGACAGTGTTCC
TGCTCTGTATGCTCTTTATACTCTGGCCGGTGCAGGTGTTGGTATCGTTTACGGTATCGCGATG
AACACGGCTAACAGATGGTTCCCGGACAAACGCGGTCTGGCTTCCGGTTTCACCGCTGCCGGTT
ACGGTCTGGGTGTTCTGCCGTTCCTGCCACTGATCAGCTCCGTTCTGAAAGTTGAAGGTGTTGG
CGCAGCATTCATGTACACCGGTTTGATCATGGGTATCCTGATTATCCTGATCGCTTTCGTTATC
CGTTTCCCTGGCCAGCAAGGCGCCAAAAAACAAATCGTTGTTACCGACAAGGATTTCAATTCTG
GCGAAATGCTGAGAACACCACAATTCTGGGTTCTGTGGACCGCATTCTTTTCCGTTAACTTTGG
TGGTTTGCTGCTGGTTGCCAACAGCGTCCCTTACGGTCGCAGCCTCGGTCTTGCCGCAGGTGTG
CTGACGATCGGTGTTTCGATCCAGAACCTGTTCAATGGTGGTTGCCGTCCTTTCTGGGGTTTCG
TTTCCGATAAAATCGGCCGTTACAAAACCATGTCCGTCGTTTTCGGTATCAATGCTGTTGTTCT
CGCACTTTTCCCGACGATTGCTGCCTTGGGCGATGTAGCCTTTATCGCCATGTTGGCAATCGCA
TTCTTCACATGGGGTGGTAGCTACGCTCTGTTCCCATCGACCAACAGCGATATTTTCGGTACGG
CATACTCTGCCAGAAACTATGGTTTCTTCTGGGCTGCAAAAGCAACTGCCTCGATCTTCGGTGG
TGGTCTGGGTGCTGCAATTGCAACCAACTTCGGATGGAATACCGCTTTCCTGATTACTGCGATT
ACTTCTTTCATCGCATTTGCTCTGGCTACCTTCGTTATTCCAAGAATGGGCCGTCCAGTCAAGA
AAATGGTCAAATTGTCTCCAGAAGAAAAAGCTGTACATTAA
-Exemplary Oxalobacter formigenes Formate/oxalate MFS antiporter
(MFS of) Amino Acid Sequence
SEQ ID NO: 161
MNNPQTGQSTGLLGNRWFYLVLAVLLMCMISGVQYSWTLYANPVKDNLGVSLAAVQTAFTLSQV
IQAGSQPGGGYFVDKFGPRIPLMFGGAMVLAGWTFMGMVDSVPALYALYTLAGAGVGIVYGIAM
NTANRWFPDKRGLASGFTAAGYGLGVLPFLPLISSVLKVEGVGAAFMYTGLIMGILIILIAFVI
RFPGQQGAKKQIVVTDKDFNSGEMLRTPQFWVLWTAFFSVNFGGLLLVANSVPYGRSLGLAAGV
LTIGVSIQNLFNGGCRPFWGFVSDKIGRYKTMSVVFGINAVVLALFPTIAALGDVAFIAMLAIA
FFTWGGSYALFPSTNSDIFGTAYSARNYGFFWAAKATASIFGGGLGAAIATNFGWNTAFLITAI
TSFIAFALATFVIPRMGRPVKKMVKLSPEEKAVH
-Exemplary Methylobacterium sp. Formate/oxalate MFS antiporter (MFS
mb1) Nucleic Acid Coding Sequence
SEQ ID NO: 162
ATGGAACGCCAGGATTCGCCGTCGGCGAAATGGTGGCAGCTCGCCTTCGGCGTGATCTGCATGG
CCATGATCGCCAACCTCCAATACGGTTGGACGTTGTTCGTGGACCCGATCGACCAGCGCTACCA
CTGGGGACGCGCGGCGATCCAGCTCGCCTTCACGCTGTTCGTCGCCACCGAGACCTGGCTGGTC
CCGGTCGAGGCGTGGTTCGTCGACCGCTACGGCCCGAAGATCGTGGTCGCGTTCGGCGGCGTGA
TGATCGCCCTCGCCTGGACGATCAACGCCTACGCCGACAGCCTGGCGATGCTCTATCTCGGCGC
CGTCATCGCCGGCATCGGTGCGGGCTCGGTCTACGGCACCTGCGTGGGCAACGCGCTCAAGTGG
TTCCCGCATCGCCGCGGCCTCGCCGCCGGTGCCACCGCGGCCGGCTTCGGCGCGGGTGCCGCCA
TCACGGTGGTACCGATCGCCCGCATGATCGCGTCGAGCGGTTACCAGGACGCCTTCCTGTATTT
CGGCATCGGTCAGGGCGCCGTGGTCCTCGCGCTCGCCTTCCTGCTGCGCAAGCCGTCGACCAAC
TCGCCGGTCCAGCGCAAGAGCACCCGCCTGCCGCAGACCAAGGTCGACCGCAGCCCCCGCGAGG
CGGTGCGCACCCCGGTCTTCTGGGTGATGTACGCCATGTTCGTGATGGTCGCCTCCGGCGGCCT
GATGGCGGCGGCGCAGATCGCCCCGATCGCCCACGACTTCCAGGTGGCGGGCGTGCCGGTGAGC
CTGTTCGGCCTCCAGATGGCGGCGCTGACGCTTGCGATCTCGCTCGACCGGATCTTCGACGGGT
TCGGGCGGCCGTTCTTCGGCTACGTCTCCGACAACATCGGCCGCGAGAACACGATGTTCATCGC
CTTCTCGACGGCGGCGCTGGCGGTGATCGTGCTGCTGACCTACGGTCACATCCCGATGGTCTTC
GTGCTGGCCACCGCGGTGTATTTCGGGGTGTTCGGCGAGATCTACTCGCTGTTCCCGGCGACCT
GCGGCGACACGTTCGGCTCCAAGTACGCCGCCAGCAATGCCGGCCTGCTCTACACCGCCAAGGG
CACCGCGGCGTTCCTCGTGCCCTTCGCCAGCCTCCTGTCGGCGGCCTACGGCTGGTCGGCGGTG
TTCACGCTGATCATCGTGCTCAACGTGACGGCGGCGGCGATGGCGATGTTCGTCCTGCGCCCGA
TGCGGGCCCGCTACCTCGCCGCGGAGGAGCATCCCGCGGCGCTCAGCGCCCATCCGATCTAA
-Exemplary Methylobacterium sp. Formate/oxalate MFS antiporter (MFS
mb1) Amino Acid Sequence
SEQ ID NO: 163
MERQDSPSAKWWQLAFGVICMAMIANLQYGWTLFVDPIDQRYHWGRAAIQLAFTLFVATETWLV
PVEAWFVDRYGPKIVVAFGGVMIALAWTINAYADSLAMLYLGAVIAGIGAGSVYGTCVGNALKW
FPHRRGLAAGATAAGFGAGAAITVVPIARMIASSGYQDAFLYFGIGQGAVVLALAFLLRKPSTN
SPVQRKSTRLPQTKVDRSPREAVRTPVFWVMYAMFVMVASGGLMAAAQIAPIAHDFQVAGVPVS
LFGLQMAALTLAISLDRIFDGFGRPFFGYVSDNIGRENTMFIAFSTAALAVIVLLTYGHIPMVF
VLATAVYFGVFGEIYSLFPATCGDTFGSKYAASNAGLLYTAKGTAAFLVPFASLLSAAYGWSAV
FTLIIVLNVTAAAMAMFVLRPMRARYLAAEEHPAALSAHPIRAA
-Exemplary Methylobacterium sp. Formate/oxalate MFS antiporter (MFS
mb2) Nucleic Acid Coding Sequence
SEQ ID NO: 164
ATGTCCGAGATCGTCAAACCGGCGGGGCGTGGCCGATGGCTGCAACTCGCCTTCGGCGTGGTCT
GCATGTGCATGATCGCCAACATGCAGTACGGTTGGACCTTCTTCGTGAACCCGATGCAGGAGCG
GCACGGCTGGGATCGCGCGGCGATCCAGGTGGCGTTCACGCTGTTCGTCGTCACCGAGACGTGG
CTGGTCCCGATCGAGGGCTGGTTTGTCGACAAGTATGGCCCGCGGATCGTCACGCTGTTCGGCG
GCCTGCTCTGCGGCATCGCCTGGGTGATCAACTCCTACGCCGACTCGCTCACCGTCCTGTACAT
CGCGGCCGCGATCGGCGGCACCGGCGCCGGTGCGGTCTACGGAACCTGCGTCGGCAATTCGCTG
AAGTGGTTTCCCGACCGACGCGGCCTCGCCGCGGGCATCACCGCGATGGGCTTCGGCGCGGGCT
CGGCCCTGACCGTCGTGCCGATCCAGGCCATGATCAAGTCGCAGGGCTACGAGGCGGCGTTCTT
CTACTTCGGTATCGGGCAGGGCGTCATCGTGATGCTCATCGCCCTGTTCCTGCGGTCGCCCGCG
AAGGGGCAGGTTCCGGAGATCGCCCGGGTCAGCCAGTCGAAGCGCGACTACAAGCCCTCCGAGA
TGGTCCGCACGCCGATCTTCTGGGTCATGTACGCGATGTTCGTCATGATGGCGGCCGGCGGCCT
GATGGCGACCGCGCAGCTCGGCCCGATCGCCAAGGACTTCAAGATCGCCGACGTTCCGGTCTCG
CTGCTCGGGATCACGCTGCCGGCGCTGACCTTCGCGGCCACGCTCGACCGGGTGCTCAACGGCG
TGACGCGTCCGTTCTTCGGCTGGGTCTCCGACCATATCGGCCGCGAGAACACGATGTTCCTGTC
CTTCGCGATCGAAGGCCTGGGCATCTACGCGCTCAGCCAGTTCGGCCAGAACCCGATCGCCTTC
GTGCTTCTGACCGGTCTCGTGTTCTTTGCCTGGGGTGAGATCTACTCCCTGTTCCCGGCGACCT
GCGGAGACACGTTCGGCTCGAAATACGCCGCCACCAATGCCGGTCTGCTCTATACGGCCAAGGG
CACGGCGGCGCTGATCGTCCCCTATACCAGCGTGCTCACGACCATGACCGGGAGCTGGCACGCG
GTGTTCCTGGCGGCAGCGGCCCTCAACATCGTCGCGGCTCTGCTGGCGCTCTTCGTCCTGAAGC
CGATGCGGGCCGCCTATACCAAGAAGCGCGAAGCGAGCCTCGCGCCGGTCCTGGCCCAGTAA
-Exemplary Methylobacterium sp. Formate/oxalate MFS antiporter (MFS
mb2) Amino Acid Sequence
SEQ ID NO: 165
MSEIVKPAGRGRWLQLAFGVVCMCMIANMQYGWTFFVNPMQERHGWDRAAIQVAFTLFVVTETW
LVPIEGWFVDKYGPRIVTLFGGLLCGIAWVINSYADSLTVLYIAAAIGGTGAGAVYGTCVGNSL
KWFPDRRGLAAGITAMGFGAGSALTVVPIQAMIKSQGYEAAFFYFGIGQGVIVMLIALFLRSPA
KGQVPEIARVSQSKRDYKPSEMVRTPIFWVMYAMFVMMAAGGLMATAQLGPIAKDFKIADVPVS
LLGITLPALTFAATLDRVLNGVTRPFFGWVSDHIGRENTMFLSFAIEGLGIYALSQFGQNPIAF
VLLTGLVFFAWGEIYSLFPATCGDTFGSKYAATNAGLLYTAKGTAALIVPYTSVLTTMTGSWHA
VFLAAAALNIVAALLALFVLKPMRAAYTKKREASLAPVLAQ

### FADL Membrane Channel Proteins

[0345] In some embodiments, a composition described herein comprises a transgenic FADL membrane channel protein. In some embodiments, a FADL membrane channel protein is encoded by the gene Tod X. In some embodiments, a FADL membrane channel protein is encoded by the gene Cym D. In some embodiments, a FADL membrane channel protein is a member of the Porine superfamily. In some embodiments, such a protein, among other things, may participate in active transport of BTEX.

[0346] In some embodiments, a FADL membrane channel protein encoding gene and/or transgene comprises a sequence encoding a peptide sequence that is at least 90%, 91%, 92%, 93%, 94%, 95%, 96%, 97%, 98%, 99%, or 100% identical to any one of SEQ ID NOs: 167 or 169 (or a portion thereof). In some embodiments, a FADL membrane channel protein encoding gene and/or transgene comprises a nucleotide sequence that is at least 90%, 91%, 92%, 93%, 94%, 95%, 96%, 97%, 98%, 99%, or 100% identical to any one of SEQ ID NOs: 166 or 168 (or a portion thereof).

-Exemplary Pseudomonas putida FADL membrane channel protein (Tod X)
Nucleic Acid Coding Sequence
SEQ ID NO: 166
ATGAAGATTGCCAGCGTGCTCGCACTGCCTTTGAGTGGATATGCTTTCAGTGTGCATGCTACAC
AGGTTTTCGACCTGGAAGGTTATGGAGCGATCTCTCGTGCCATGGGTGGCACCAGTTCATCGTA
TTATACCGGTAATGCTGCGCTGATTAGTAATCCCGCTACATTGAGTTTTGCTCCGGACGGAAAT
CAGTTTGAGCTCGGGCTGGACGTGGTGACTACCGATATCAAGGTTCACGACAGCCACGGAGCAG
AGGCAAAAAGCAGCACGAGATCCAATAATCGAGGCCCCTATGTGGGTCCACAATTGAGCTATGT
TGCTCAGTTGGATGACTGGCGTTTCGGTGCTGGATTGTTTGTCAGTAGCGGGTTGGGTACAGAG
TATGGAAGTAAAAGTTTTCTATCACAGACAGAAAACGGAATCCAGACCAGCTTTGATAATTCCA
GCCGTCTGATCGTATTGCGCGCTCCTATTGGCTTTAGTTATCAAGCCACATCAAAGCTCACCTT
CGGCGCTAGTGTCGATCTGGTCTGGACTTCACTCAACCTTGAACTTCTACTTCCATCATCTCAG
GTGGGAGCCCTGACTGCGCAGGGGAATCTTTCAGGCGGTTTAGTTCCCTCGCTGGCTGGATTCG
TCGGGACAGGTGGTGCCGCCCATTTCAGTCTAAGTCGCAACAGTACCGCTGGTGGCGCCGTGGA
TGCGGTCGGTTGGGGCGGGCGCTTGGGACTTACCTACAAACTCACGGATAACACTGTCCTAGGT
GCGATGTACAACTTCAAGACTTCGGTGGGCGATCTCGAGGGGAAGGCGACACTTTCTGCTATCA
GTGGTGATGGAGCGGTGCTTCCATTGGATGGCGATATCCGTGTAAAAAACTTTGAGATGCCCGC
CAGTCTGACGCTTGGCCTCGCTCATCAGTTCAATGAGCGTTGGGTAGTTGCTGCTGATATCAAG
CGTGCCTACTGGGGTGATGTAATGGATAGCATGAATGTGGCTTTCATCTCGCAGTTGGGCGGGA
TCGATGTCGCATTGCCACACCGCTATCAGGATATAACGGTGGCCTCAATCGGCACTGCTTACAA
ATATAACAATGATTTAACGCTTCGTGCTGGATATAGCTATGCACAACAGGCGCTAGACAGCGAA
CTGATATTGCCAGTGATTCCTGCTTATTTGAAGCGGCACGTTACTTTCGGTGGCGAGTATGACT
TTGACAAGGACTCCAGGATCAATTTGGCAATTTCTTTTGGCCTGAGAGAGCGCGTGCAGACGCC
ATCGTACTTGGCAGGCACCGAGATGTTGCGGCAAAGCCACAGTCAAATAAATGCAGTGGTTTCC
TATAGCAAAAATTTTTAA
-Exemplary Pseudomonas putida FADL membrane channel protein (Tod X)
Amino Acid Sequence
SEQ ID NO: 167
MKIASVLALPLSGYAFSVHATQVEDLEGYGAISRAMGGTSSSYYTGNAALISNPATLSFAPDGN
QFELGLDVVTTDIKVHDSHGAEAKSSTRSNNRGPYVGPQLSYVAQLDDWRFGAGLFVSSGLGTE
YGSKSFLSQTENGIQTSFDNSSRLIVLRAPIGFSYQATSKLTFGASVDLVWTSLNLELLLPSSQ
VGALTAQGNLSGGLVPSLAGFVGTGGAAHFSLSRNSTAGGAVDAVGWGGRLGLTYKLTDNTVLG
AMYNFKTSVGDLEGKATLSAISGDGAVLPLDGDIRVKNFEMPASLTLGLAHQFNERWVVAADIK
RAYWGDVMDSMNVAFISQLGGIDVALPHRYQDITVASIGTAYKYNNDLTLRAGYSYAQQALDSE
LILPVIPAYLKRHVTFGGEYDFDKDSRINLAISFGLRERVQTPSYLAGTEMLRQSHSQINAVVS
YSKNF
-Exemplary Pseudomonas putida FADL membrane channel protein (Cym D)
Nucleic Acid Coding Sequence
SEQ ID NO: 168
ATGAAAAAAACAATATACAGCTTAAGTGCCTGCGGCATTTTGACGTGCTTGTACTGTGGTATTG
CGTCTGCAACAGATGCTTTCAACCTCGTCGGGGTTGGACCGGTTTCCCAAGGTATGGGGGGGAT
TGGTGCAGCCTTCAATATCGGGGCACAAGGTATGATGCTGAACCCGGCAACGCTTACTCAGATG
CAAGAAGGTATGCATCTGGGGCTGGGAATGGACATCATTACTGCGGAATTGGAAGTCAAGAATA
CCGCTACCGGCGAAAAAGCCGACTCCCATAGTCGTGGGCGCAACAACGGGCCTTACGTGGCGCC
TGAGCTTTCTTTGGTGTGGCGTGGTGAGCGATATGCGCTGGGAGTCGGTGCTTTTGCTTCCGAT
GGGGTTGGAACCCAGTTTGGAGACACCAGCTTTCTCTCGCGTACCACGACCAATAATCTTAATA
CAGGGCTGGAAAACTACTCCCGTCTGATAGTTTTGCGGATACCGTTCTCTGCGGCTTACCAGGT
GAACGAGAAGTTGTCCGTCGGGGCATCGTTGGATGCTGTGTGGACGTCGGTGAACTTGGGACTC
CTACTGGATACCACACAGATTGGTACATTGGTTGGACAAGGCCAGGTGTCCGGCTCATTGATGC
CAGCGTTGCTGAGCGTGCCGGAGCTGTCGGCAGGTTATCTATCCGCGGACAATCACCGTGCCAG
CGGTGGTGGCGTGGACTCCTGGGGCATAGGTGGCCGGCTTGGTCTGACCTATCAGTTGACCCCA
AAAACACGGGTGGGGATTGTATACAACTTCAAGACCCATGTTGGAGACCTGTCTGGCAATGCCG
ATTTGACGGCAGTAAGCGCTGTCGCGGGTAATATCCCTCTCTCGGGTGAACTCAAGCTACATAA
CTTCGAGATGCCAGCATCTCTCGTTGCGGGCATCAGTCACGAATTCAGTGATCAGTTTGCTGTT
GCGTTCGACTACAAGCGTGTCTACTGGAGCGATGTCATGGATGACATAGAAGTCAACTTCAAGC
AGAAAGCCACGGGCGACACTATCAATCTGAAACTGCCTTTCAATTATCGGGACACCAACGTGTA
TTCGTTGGGAGCGCAATACCGCTACGGTGCGAACTGGGTGTTTCGAGCGGGCGTGCACTATGCC
CAACTGGCCAACCCTTCAAGTGGTACAATGCCAATCATTCCTTCGACACCGACTACCAGTCTCT
CGGGAGGCTTTTCATATGCCTTCAGCCCTGAGGATGTAGTCGATTTTTCTCTGGCCTACGGATT
CAAGAAGAAAGTATCCAATGACAGCCTGCCGATCACCGACAAGCCCATCGAAGTATCGCATTCG
CAGATAGTTACATCGATTTCCTATACCAAGAGTTTCTAG
-Exemplary Pseudomonas putida FADL membrane channel protein (Cym D)
Amino Acid Sequence
SEQ ID NO: 169
MKKTIYSLSACGILTCLYCGIASATDAFNLVGVGPVSQGMGGIGAAFNIGAQGMMLNPATLTQM
QEGMHLGLGMDIITAELEVKNTATGEKADSHSRGRNNGPYVAPELSLVWRGERYALGVGAFASD
GVGTQFGDTSFLSRTTINNLNTGLENYSRLIVLRIPFSAAYQVNEKLSVGASLDAVWTSVNLGL
LLDTTQIGTLVGQGQVSGSLMPALLSVPELSAGYLSADNHRASGGGVDSWGIGGRLGLTYQLTP
KTRVGIVYNFKTHVGDLSGNADLTAVSAVAGNIPLSGELKLHNFEMPASLVAGISHEFSDQFAV
AFDYKRVYWSDVMDDIEVNFKQKATGDTINLKLPFNYRDTNVYSLGAQYRYGANWVFRAGVHYA
QLANPSSGTMPIIPSTPTTSLSGGFSYAFSPEDVVDFSLAYGFKKKVSNDSLPITDKPIEVSHS
QIVTSISYTKSF

### Modifying Metabolic Pathways

[0347] Among other things, the present disclosure provides compositions, methods of producing, and methods of using genetically modified plants with optimized metabolic pathways capable of providing useful catabolic and/or anabolic functions.

[0348] In certain embodiments, once inside an engineered plant (e.g., root, leaf, stem, etc.), VOCs can be metabolized, and undergo degradation, storage, and/or excretion. For example, in certain embodiments, formaldehyde can be transformed into molecules that can serve as a carbon source and be used for biosynthesis of novel molecules, and after transformation to CO₂ the carbon may also be incorporated into the plant material via the Calvin cycle. In some embodiments, an engineered plant comprises an engineered pathway as described in FIG. 2. In some embodiments, an engineered plant comprises an engineered pathway as described in FIG. 3.

[0349] In certain embodiments, a targeted VOC is formaldehyde (HCHO), which may act as a carbon source entering the Calvin-Benson Cycle. In some embodiments of such a metabolic pathway, HCHO may be metabolized through the following metabolic mechanism (pathway 1): 1) Dihydroxyacetone synthase (DAS) combining HCHO and xylulose 5-phosphate (Xu5P) producing Glyceraldehyde 3-phosphate (3PGA) in turn entering into the Calvin-Benson Cycle, and dihydroxyacetone (DHA) 2) Dihydroxyacetone Kinase (DAK) phosphorylating DHA into Dihydroxyacetone phosphate (DHAP); 3) DHAP entering into the endogenous plant Calvin-Benson Cycle. In certain embodiments, one or more of the enzymatic components of this pathway may be introduced as a transgene as described herein (see FIGS. 4-9).

[0350] In certain embodiments, a targeted VOC is formaldehyde (HCHO), which may act as a carbon source entering the Calvin-Benson Cycle. In some embodiments of such a metabolic pathway, HCHO may be metabolized through the following metabolic mechanism (pathway 2): 1) 3-Hexulose-6-phosphate synthase (HPS) combining HCHO and ribulose 5-phosphate (Ru5P) producing D-arabino-3-hexulose 6-phosphate (Hu6P) 2) 6-phospho-3-hexuloisomerase (PHI) isomerizing Hu6P into fructose 6-phosphate (F6P); 3) F6P entering into the endogenous plant Calvin-Benson Cycle. In certain embodiments, one or more of the enzymatic components of this pathway may be introduced as a transgene as described herein (see FIGS. 4-9).

[0351] In certain embodiments, a targeted VOC is formaldehyde (HCHO), which may act as a carbon source entering the plant endogenous metabolism. In some embodiments of such a metabolic pathway, HCHO may be metabolized through the following metabolic mechanism (pathway 3): 1) Glutathione-independent formaldehyde dehydrogenase (FALDH) and/or Glutathione-dependent formaldehyde dehydrogenase (GSH-FALDH) with cofactor NAD+ producing Formate; 2) Formate dehydrogenase (FDH) with cofactor NAD+ producing CO2; 3) Entry of CO2 into any plant endogenous metabolism pathways, like the Calvin-Benson Cycle. In certain embodiments, Serine hydroxymethyltransferase 1, mitochondrial (SHM1) and/or(S)-2-hydroxy-acid oxidase (GLO1 and/or GLO2) may also impact the metabolic flux of HCHO metabolism as described herein, for example, through the production of L-Serine and/or oxocarboxylate. In certain embodiments, one or more of the enzymatic components of this pathway may be introduced as a transgene as described herein (see FIGS. 4-9).

[0352] In certain embodiments, a targeted VOC is formaldehyde (HCHO), which may act as a carbon source entering the Calvin-Benson Cycle. In some embodiments of such a metabolic pathway, HCHO may be metabolized through the following metabolic mechanism (pathway 4): 1) Formolase (FLS) converting two molecules of HCHO into glycolaldehyde (GALD) 2) Formolase combining a molecule of GALD and a molecule of HCHO into dihydroxyacetone (DHA) 3) Dihydroxyacetone Kinase (DAK) phosphorylating DHA into Dihydroxyacetone phosphate (DHAP); 3) DHAP entering into the endogenous plant Calvin-Benson Cycle. In certain embodiments, one or more of the enzymatic components of this pathway may be introduced as a transgene as described herein (see FIGS. 4-9).

[0353] In certain embodiments, a targeted VOC is formaldehyde (HCHO), which may act as a carbon source used to synthesize acetyl coenzyme A (Ac-CoA). In some embodiments of such a metabolic pathway, HCHO may be metabolized through the following metabolic mechanism (pathway 5): 1) glycolaldehyde synthase (GALS) converting two molecules of HCHO into glycolaldehyde (GALD) 2) acetyl-phosphate synthase (ACPS) adding inorganic phosphate (Pi) to GALD to produce acetyl-phosphate (AcP) 3) phosphate acetyltransferase (PTA) combines coenzyme A with AcP to produce acetyl coenzyme A (Ac-COA) 4) Ac-COA entering into various endogenous plant metabolic pathways, for example fatty acid synthesis. In certain embodiments, one or more of the enzymatic components of this pathway may be introduced as a transgene as described herein (see FIGS. 4-9).

[0354] In certain embodiments, a targeted VOC is formaldehyde (HCHO), which may act as a carbon source used to synthesize 1,3-Propanediol. In some embodiments of such a metabolic pathway, HCHO may be metabolized through the following metabolic mechanism (pathway 6): 1) 2-keto-4-hydroxybutyrate aldolase (KHB) combines HOCH with pyruvate to form 4-hydroxy-2-oxobutanoate (2-keto-4-hydroxybutyrate) 2) branched-chain alpha-keto acid decarboxylase (KDC) or pyruvate decarboxylase (PDC) combining 4-hydroxy-2-oxobutanoate with CO2 to form 3-Hydroxypropionaldehyde (Reuterine) 3) NADH-dependent 1,3-PDO oxidoreductase (DhaT) or a non-specific NADPH-dependent alcohol dehydrogenase (YqhD) turns reuterine into 1,3-Propanediol 4) 1,3-Propanediol integrating various endogenous plant metabolic pathways. In certain embodiments, one or more of the enzymatic components of this pathway may be introduced as a transgene as described herein (see FIGS. 4-9).

[0355] In certain embodiments, a targeted VOC is formaldehyde (HCHO), which may act as a carbon source used to synthesize homoserine. In some embodiments of such a metabolic pathway, HCHO may be metabolized through the following metabolic mechanism (pathway 7): 1) serine aldolase (SAL) or threonine aldolase (LtaE) combining HOCH with glycine to form serine 2) serine being then deaminated to pyruvate by serine deaminase (SDA) 3) 4-hydroxy-2-oxobutanoate (HOB) aldolase (HAL) combining formaldehyde and pyruvate to from HOB 4) HOB aminotransferase (HAT) turning HOB into Homoserine 5) Homoserine (HSer) integrating various endogenous plant metabolic pathways. In certain embodiments, one or more of the enzymatic components of this pathway may be introduced as a transgene as described herein (see FIGS. 4-9.

[0356] In certain embodiments, a targeted VOC is benzene, toluene, ethylbenzene, and/or xylene (BTEX), any of which may act as a carbon source. In such a metabolic pathway, BTEX may be metabolized in the following mechanism (pathway 8): 1) A monooxygenase or hydrolase adds on or two-OH group to the benzene ring, turning it into a phenolic compound. These enzymes are here referred to as “BTEX Step 1” and can be: cytochrome P450 monooxygenase (P450-RR) Toluene, O-xylene Monooxygenase Oxygenase Subunit alpha (TouA-P-OX), benzene monooxygenase oxygenase subunit (BmoA-Pa) Toluene-4-monooxygenase (TmoF_Pm) Toluene monooxygenase alpha subunit (TbuA1-Mp), aromatic ring-hydroxylating dioxygenase subunit alpha (TodC1 (bnzA)_Pp), hydroxylase alpha subunit (tmoA_P_sp_BDa59), hydroxylase alpha subunit (tmoA_Pm), Eng-Phenylalanine Hydroxylase (PHOH-Pt) 2) A monooxygenase or hydrolase might add a second-OH group to the benzene ring of the phenolic compound, turning it into a catechol-like compound. These enzymes are here referred to as “BTEX Step 2” and can be: phenol hydroxylase component phP (PH_PS_OX1) Phenol monooxygenase (PMO-cc) Phenol hydroxylase (PH-CC or PH-AO). 2) A dioxygenase cuts open the benzene ring of the catecholic compound, turning it either into cis, cis-Muconate or 2-Hydroxymuconate semialdehyde. These enzymes are here referred to respectively as “BTEX Ortho” and “BTEX Meta” and can be: 3-isopropylcatechol-2,3-dioxygenase (lpbc_P_sp_JR1), LE2_PSEPU Metapyrocatechase (xylE_Pp), extradiol dioxygenase (Dbtc_B_DBT1_OX), catechol 2,3-dioxygenase (tbuE_Rp C) Chlorocatechol 1,2-dioxygenase (tfdc), catA_Pp, catA_Pr, salD_Pr. In certain embodiments, one or more of the enzymatic components of this pathway may be introduced as a transgene as described herein (see FIGS. 4-9).

### Formaldehyde Metabolism

[0357] In some embodiments, the present disclosure provides compositions and methods for engineering plants to be effective metabolizers of formaldehyde. In certain embodiments, one or more constructs and/or transgenes described herein are engineered into a plant to facilitate metabolism of formaldehyde. In some embodiments, a pathway that is engineered is described in FIG. 2.

### A) Ribulose Monophosphate Pathway.

[0358] In some embodiments, compositions and methods described herein comprise introduction of one or more genes coding for one or more enzymes such as: 3-hexulose-6-phosphate synthase (HPS) and 6-phospho-3-hexuloisomerase (PHI). In some embodiments, these enzymes metabolize the substrates Ru5P and HCHO to produce Hu6P and/or F6P. In some embodiments, Hu6P and/or F6P function as components of the Calvin-Benson cycle, a photosynthetic carbon fixation pathway. In some embodiments, HPS and PHI function are incorporated into one enzyme, and only one gene is introduced that facilitates the conversion of formaldehyde directly to fructose 6-phosphate.

### 3-Hexulose-6-Phosphate Formaldehyde Lyase (HPS/PHI)

[0359] In some embodiments, a composition described herein comprises a transgenic HPS/PHI protein. In some embodiments, such a protein, among other things, may utilize formaldehyde as a substrate and produce fructose 6-phosphate (F6P).

[0360] In some embodiments, a HPS/PHI gene and/or transgene comprises a sequence encoding a peptide sequence that is at least 90%, 91%, 92%, 93%, 94%, 95%, 96%, 97%, 98%, 99%, or 100% identical to any one of SEQ ID NOs: 171 or 173 (or a portion thereof). In some embodiments, a HPS/PHI gene and/or transgene comprises a nucleotide sequence that is at least 90%, 91%, 92%, 93%, 94%, 95%, 96%, 97%, 98%, 99%, or 100% identical to any one of SEQ ID NOs: 170 or 172 (or a portion thereof).

-Exemplary Pyrococcus horikoshii OT3 3-hexulose-6-phosphate
formaldehyde lyase (HPS/PHI-archea) Nucleic Acid Coding Sequence
SEQ ID NO: 170
ATGATCCTTCAGGTTGCTTTGGATCTAACGGACATCGAACAGGCTATATCAATAGCAGAGAAAG
CAGCCAGGGGTGGCGCGCATTGGCTTGAGGTTGGAACTCCGCTAATCAAGAAGGAAGGTATGCG
TGCGGTCGAGTTATTGAAAAGACGTTTCCCTGACAGGAAGATTGTTGCAGATCTCAAAACCATG
GACACCGGGGCGCTTGAAGTTGAGATGGCCGCTAGACACGGGGCGGACGTCGTTTCGATTTTGG
GCGTTGCTGATGATAAGACCATCAAGGACGCTTTAGCAGTTGCCAGGAAATACGGTGTGAAAAT
CATGGTGGATTTGATCGGAGTAAAAGACAAGGTGCAGAGAGCAAAAGAGTTAGAACAAATGGGA
GTTCATTACATACTTGTACATACGGGAATCGACGAACAAGCACAGGGGAAAACTCCTCTTGAAG
ATCTAGAGAAGGTGGTCAAGGCCGTAAAGATTCCAGTGGCAGTGGCCGGTGGATTAAATCTGGA
AACAATCCCCAAGGTTATAGAACTCGGCGCGACTATAGTGATTGTGGGCAGTGCAATCACTAAG
AGCAAAGACCCAGAGGGAGTGACGAGGAAGATTATCGACTTATTTTGGGATGAGTACATGAAAA
CGATCCGAAAAGCGATGAAGGATATAACTGATCACATAAACGAAGTTGCAGACAAGCTCAGACT
CGACGAGGTGAGAGGTCTAGTGGATGCAATGATAGGCGCAAATAAAATCTTCATCTACGGCGCC
GGTCGGTCTGGCCTTGTGGGAAAGGCTTTTGCGATGAGATTAATGCATCTTGACTTCAATGTGT
ATGTCGTGGGCGAGACAATAACCCCGGCCTTCGAAGAGGGCGACCTTCTCATTGCTATCTCCGG
TAGTGGAGAAACAAAGACAATCGTCGACGCCGCGGAGATAGCAAAACAACAGGGCGGTAAAGTC
GTTGCCATAACGAGTTACAAAGACTCGACTTTGGGCAGACTGGCCGATGTAGTTGTAGAAATTC
CAGGGAGAACTAAAACGGACGTCCCGACAGATTATATTGCGAGGCAAATGTTAACTAAGTACAA
ATGGACAGCGCCCATGGGGACCCTATTTGAAGATTCAACTATGATCTTTCTTGACGGGATTATA
GCGCTATTAATGGCGACTTTTCAGAAAACTGAGAAAGACATGAGGAAGAAGCACGCAACTCTAG
AG
-Exemplary Pyrococcus horikoshii OT3 3-hexulose-6-phosphate
formaldehyde lyase (HPS/PHI-archea) Amino Acid Sequence
SEQ ID NO: 171
MILQVALDLTDIEQAISIAEKAARGGAHWLEVGTPLIKKEGMRAVELLKRRFPDRKIVADLKTM
DTGALEVEMAARHGADVVSILGVADDKTIKDALAVARKYGVKIMVDLIGVKDKVQRAKELEQMG
VHYILVHTGIDEQAQGKTPLEDLEKVVKAVKIPVAVAGGLNLETIPKVIELGATIVIVGSAITK
SKDPEGVTRKIIDLFWDEYMKTIRKAMKDITDHINEVADKLRLDEVRGLVDAMIGANKIFIYGA
GRSGLVGKAFAMRLMHLDFNVYVVGETITPAFEEGDLLIAISGSGETKTIVDAAEIAKQQGGKV
VAITSYKDSTLGRLADVVVEIPGRTKTDVPTDYIARQMLTKYKWTAPMGTLFEDSTMIFLDGII
ALLMATFQKTEKDMRKKHATLE
-Exemplary Synthetic 3-hexulose-6-phosphate formaldehyde lyase (HPS-
synthetic) Nucleic Acid Coding Sequence
SEQ ID NO: 172
ATGAAGCTCCAAGTCGCCATCGACCTGCTGTCCACCGAAGCCGCCCTCGAGCTGGCCGGCAAGG
TTGCCGAGTACGTCGACATCATCGAACTGGGCACCCCCCTGATCAAGGCCGAGGGCCTGTCGGT
CATCACCGCCGTCAAGAAGGCTCACCCGGACAAGATCGTCTTCGCCGACATGAAGACCATGGAC
GCCGGCGAGCTCGAAGCCGACATCGCGTTCAAGGCCGGCGCTGACCTGGTCACGGTCCTCGGCT
CGGCCGACGACTCCACCATCGCGGGTGCCGTCAAGGCCGCCCAGGCTCACAACAAGGGCGTCGT
CGTCGACCTGATCGGCATCGAGGACAAGGCCACCCGTGCACAGGAAGTTCGCGCCCTGGGTGCC
AAGTTCGTCGAGATGCACGCTGGTCTGGACGAGCAGGCCAAGCCCGGCTTCGACCTGAACGGTC
TGCTCGCCGCCGGCGAGAAGGCTCGCGTTCCGTTCTCCGTGGCCGGTGGCGTGAAGGTTGCGAC
CATCCCCGCAGTCCAGAAGGCCGGCGCAGAGGTTGCCGTCGCCGGTGGCGCCATCTACGGTGCA
GCCGACCCGGCCGCCGCCGCGAAGGAACTGCGCGCCGCGATCGCCATGACGCAAGCCGCAGAAG
CCGACGGGGCCGTGAAGGTCGTCGGAGACGACATCACCAACAACCTTTCCCTTGTTCGGGACGA
GGTCGCGGACACCGCGGCGAAAGTCGACCCGGAGCAGGTGGCTGTCCTCGCTCGCCAAATCGTC
CAGCCTGGACGGGTTTTCGTGGCGGGCGCCGGTCGCAGCGGGCTCGTCCTGCGCATGGCCGCCA
TGCGGCTGATGCACTTCGGCCTCACCGTGCACGTCGCGGGCGACACCACCACCCCGGCAATCTC
AGCCGGCGATCTGCTGCTGGTGGCTTCCGGCTCGGGCACCACCTCCGGTGTGGTCAAGTCCGCC
GAGACGGCCAAGAAGGCCGGGGCGCGCATCGCCGCCTTCACCACCAACCCGGATTCTCCGCTGG
CCGGTCTGGCCGACGCCGTGGTGATCATCCCCGCCGCGCAGAAGACCGATCACGGCTCGCACAT
TTCGCGGCAGTACGCCGGATCCCTTTTCGAGCAGGTGCTGTTCGTCGTCACCGAAGCCGTGTTC
CAGTCGCTGTGGGATCACACCGAGGTCGAGGCCGAGGAACTCTGGACGCGCCACGCCAACCTCG
AGTGA
-Exemplary Synthetic 3-hexulose-6-phosphate formaldehyde lyase (HPS-
synthetic) Amino Acid Sequence
SEQ ID NO: 173
MKLQVAIDLLSTEAALELAGKVAEYVDIIELGTPLIKAEGLSVITAVKKAHPDKIVFADMKTMD
AGELEADIAFKAGADLVTVLGSADDSTIAGAVKAAQAHNKGVVVDLIGIEDKATRAQEVRALGA
KFVEMHAGLDEQAKPGFDLNGLLAAGEKARVPFSVAGGVKVATIPAVQKAGAEVAVAGGAIYGA
ADPAAAAKELRAAIAMTQAAEADGAVKVVGDDITNNLSLVRDEVADTAAKVDPEQVAVLARQIV
QPGRVFVAGAGRSGLVLRMAAMRLMHFGLTVHVAGDTTTPAISAGDLLLVASGSGTTSGVVKSA
ETAKKAGARIAAFTTNPDSPLAGLADAVVIIPAAQKTDHGSHISRQYAGSLFEQVLFVVTEAVE
QSLWDHTEVEAEELWTRHANLE

### 3-Hexulose-6-Phosphate Synthase (HPS)

[0361] In some embodiments, a composition described herein comprises a transgenic HPS protein. In some embodiments, such a protein, among other things, may utilize formaldehyde as a substrate and produce D-arabino-3-hexulose 6-phosphate, (Hu6P). In some embodiments, such a protein, may be fused with a PHI enzyme.

[0362] In some embodiments, a HPS gene and/or transgene comprises a sequence encoding a peptide sequence that is at least 90%, 91%, 92%, 93%, 94%, 95%, 96%, 97%, 98%, 99%, or 100% identical to any one of SEQ ID NOs: 175 or 177 (or a portion thereof). In some embodiments, a HPS gene and/or transgene comprises a nucleotide sequence that is at least 90%, 91%, 92%, 93%, 94%, 95%, 96%, 97%, 98%, 99%, or 100% identical to any one of SEQ ID NOs: 174 or 176 (or a portion thereof).

-Exemplary Mycobacterium gastri 3-hexulose-6-phosphate synthase
(HPS-Mg) Nucleic Acid Coding Sequence
SEQ ID NO: 174
ATGAAACTACAAGTTGCGATAGATCTCTTGTCTACAGAAGCAGCTTTGGAATTGGCCGGTAAAG
TGGCTGAGTACGTGGACATCATAGAATTGGGTACGCCCCTGATAGAAGCAGAGGGTCTTTCGGT
AATTACAGCCGTTAAAAAGGCACATCCCGACAAGATTGTTTTCGCCGATATGAAAACCATGGAT
GCAGGTGAACTCGAGGCAGACATTGCATTTAAAGCTGGTGCAGACCTCGTGACTGTTCTTGGGA
GCGCCGACGATTCTACAATTGCAGGCGCAGTTAAAGCAGCCCAAGCCCACAACAAAGGCGTCGT
GGTTGATCTGATCGGCATCGAGGACAAAGCGACCAGAGCCCAAGAAGTGAGAGCATTGGGCGCC
AAGTTTGTTGAGATGCACGCAGGCCTCGATGAACAAGCCAAGCCCGGCTTCGACTTGAACGGTT
TGTTAGCAGCCGGCGAGAAAGCACGCGTTCCTTTTAGTGTAGCAGGTGGCGTTAAGGTCGCTAC
GATCCCTGCTGTCCAAAAAGCTGGTGCGGAAGTGGCAGTTGCGGGCGGTGCCATCTATGGGGCA
GCTGATCCCGCGGCCGCTGCCAAAGAGCTTAGAGCAGCTATAGCC
-Exemplary Mycobacterium gastri 3-hexulose-6-phosphate synthase
(HPS-Mg) Amino Acid Sequence
SEQ ID NO: 175
MKLQVAIDLLSTEAALELAGKVAEYVDIIELGTPLIEAEGLSVITAVKKAHPDKIVFADMKTMD
AGELEADIAFKAGADLVTVLGSADDSTIAGAVKAAQAHNKGVVVDLIGIEDKATRAQEVRALGA
KFVEMHAGLDEQAKPGFDLNGLLAAGEKARVPFSVAGGVKVATIPAVQKAGAEVAVAGGAIYGA
ADPAAAAKELRAAIA
-Exemplary Bacillus methanolicus MGA3 3-hexulose-6-phosphate
synthase (HPS-Bm) Nucleic Acid Coding Sequence
SEQ ID NO: 176
ATGGAACTACAGTTGGCATTAGACTTAGTCAACATTGAAGAGGCAAAGCAAGTGGTTGCGGAAG
TCCAAGAGTATGTGGATATTGTGGAGATTGGAACTCCAGTAATAAAGATATGGGGTTTGCAAGC
AGTCAAAGCTGTTAAGGATGCGTTCCCACATCTGCAAGTTTTGGCCGATATGAAAACGATGGAT
GCAGCCGCATACGAAGTAGCTAAAGCGGCCGAGCACGGAGCTGACATCGTTACGATTCTTGCAG
CGGCCGAGGACGTGTCTATCAAAGGTGCAGTTGAAGAGGCGAAAAAGTTAGGAAAGAAAATACT
GGTGGACATGATTGCCGTTAAAAATTTAGAGGAAAGAGCCAAGCAGGTAGATGAGATGGGGGTC
GACTATATATGTGTACATGCAGGGTATGACTTGCAGGCTGTTGGAAAAAATCCCTTAGATGACC
TAAAGAGGATAAAAGCCGTGGTTAAGAACGCTAAAACTGCGATCGCAGGGGGAATCAAACTCGA
AACGTTACCCGAGGTTATCAAAGCAGAACCAGATCTAGTGATTGTGGGAGGGGGCATTGCAAAC
CAAACAGACAAGAAAGCTGCAGCTGAAAAGATTAATAAACTTGTGAAACAGGGCCTT
-Exemplary Bacillus methanolicus MGA3 3-hexulose-6-phosphate
synthase (HPS-Bm) Amino Acid Sequence
SEQ ID NO: 177
MELQLALDLVNIEEAKQVVAEVQEYVDIVEIGTPVIKIWGLQAVKAVKDAFPHLQVLADMKTMD
AAAYEVAKAAEHGADIVTILAAAEDVSIKGAVEEAKKLGKKILVDMIAVKNLEERAKQVDEMGV
DYICVHAGYDLQAVGKNPLDDLKRIKAVVKNAKTAIAGGIKLETLPEVIKAEPDLVIVGGGIAN
QTDKKAAAEKINKLVKQGL

### 6-Phospho-3-Hexuloisomerase (PHI)

[0363] In some embodiments, a composition described herein comprises a transgenic PHI protein. In some embodiments, such a protein, among other things, may utilize D-arabino-3-hexulose 6-phosphate (Hu6P) as a substrate and produce fructose 6-phosphate (F6P). In some embodiments, such a protein, may be fused with a HPS enzyme.

[0364] In some embodiments, a PHI gene and/or transgene comprises a sequence encoding a peptide sequence that is at least 90%, 91%, 92%, 93%, 94%, 95%, 96%, 97%, 98%, 99%, or 100% identical to any one of SEQ ID NOs: 179 or 181 (or a portion thereof). In some embodiments, a PHI gene and/or transgene comprises a nucleotide sequence that is at least 90%, 91%, 92%, 93%, 94%, 95%, 96%, 97%, 98%, 99%, or 100% identical to any one of SEQ ID NOs: 178 or 180 (or a portion thereof).

-Exemplary Bacillus methanolicus MGA3 6-phospho-3-hexuloisomerase
(PHI-Bm) Nucleic Acid Coding Sequence
SEQ ID NO: 178
ATGATTTCCATGCTTACCACTGAATTTCTGGCAGAAATAGTGAAAGAGTTGAACAGTAGCGTAA
ATCAAATCGCAGACGAAGAGGCTGAAGCGCTGGTTAACGGCATATTGCAATCGAAGAAAGTGTT
CGTGGCGGGAGCTGGTCGTTCCGGGTTCATGGCGAAGTCATTCGCCATGAGGATGATGCACATG
GGGATCGATGCTTATGTGGTCGGAGAGACAGTGACACCAAATTATGAGAAAGAGGATATCCTTA
TAATTGGGTCAGGGTCAGGGGAAACCAAAAGTTTGGTTTCAATGGCTCAGAAAGCGAAAAGCAT
CGGGGGCACAATTGCAGCGGTGACAATTAATCCTGAGTCTACCATCGGTCAATTGGCTGATATA
GTAATAAAAATGCCCGGATCTCCAAAAGACAAATCTGAAGCCAGGGAAACAATCCAACCAATGG
GATCTCTTTTCGAGCAAACTCTTTTGCTCTTTTACGACGCCGTAATACTTAGATTTATGGAAAA
GAAAGGACTTGACACCAAAACAATGTACGGTAGGCACGCAAATTTGGAGTGA
-Exemplary Bacillus methanolicus MGA3 6-phospho-3-hexuloisomerase
(PHI-Bm) Amino Acid Sequence
SEQ ID NO: 179
MISMLTTEFLAEIVKELNSSVNQIADEEAEALVNGILQSKKVFVAGAGRSGFMAKSFAMRMMHM
GIDAYVVGETVTPNYEKEDILIIGSGSGETKSLVSMAQKAKSIGGTIAAVTINPESTIGQLADI
VIKMPGSPKDKSEARETIQPMGSLFEQTLLLFYDAVILRFMEKKGLDTKTMYGRHANLE
-Exemplary Mycobacterium gastri 6-phospho-3-hexuloisomerase (PHI-Mg)
Nucleic Acid Coding Sequence
SEQ ID NO: 180
ATGACCCAAGCGGCAGAAGCAGACGGCGCGGTCAAAGTAGTTGGCGATGACATAACTAACAATC
TGAGCCTAGTAAGGGATGAAGTCGCCGATACAGCAGCCAAGGTGGACCCAGAACAAGTGGCTGT
CCTCGCAAGGCAGATCGTGCAGCCTGGTAGGGTGTTTGTGGCTGGCGCAGGACGAAGCGGACTG
GTTCTGCGGATGGCTGCCATGAGACTTATGCATTTTGGACTGACCGTGCATGTGGCCGGGGATA
CGACTACGCCTGCCATTTCTGCAGGGGACTTGCTTTTAGTCGCTAGTGGGTCAGGGACCACATC
TGGAGTGGTTAAAAGTGCTGAGACAGCTAAGAAAGCAGGGGCAAGAATCGCAGCCTTTACAACT
AATCCAGATAGTCCGCTCGCCGGACTTGCAGATGCCGTGGTTATCATACCTGCTGCGCAGAAAA
CGGATCATGGGTCGCATATATCACGGCAATATGCTGGCAGTCTCTTTGAGCAGGTTCTCTTTGT
GGTTACCGAGGCCGTCTTTCAATCACTCTGGGACCACACTGAAGTCGAAGCTGAGGAACTATGG
ACACGGCACGCTAATCTAGAATAG
-Exemplary Mycobacterium gastri 6-phospho-3-hexuloisomerase (PHI-Mg)
Amino Acid Sequence
SEQ ID NO: 181
MTQAAEADGAVKVVGDDIINNLSLVRDEVADTAAKVDPEQVAVLARQIVQPGRVFVAGAGRSGL
VLRMAAMRLMHFGLTVHVAGDTTTPAISAGDLLLVASGSGTTSGVVKSAETAKKAGARIAAFTT
NPDSPLAGLADAVVIIPAAQKTDHGSHISRQYAGSLFEQVLFVVTEAVFQSLWDHTEVEAEELW
TRHANLE

### Synthetic Acetyl-CoA Enzymes (SACA)

[0365] In certain embodiments, a composition described herein comprises at least one transgenic SACA pathway enzyme. In some embodiments, such enzymes metabolize substrates such as formaldehyde, glycoaldehyde, and/or acetylphosphate to create products such as glycoaldehyde, acetylphosphate, and/or acetylCOA. In certain embodiments, acetylCOA is further utilized in the citric acid cycle.

[0366] In some embodiments, a SACA gene and/or transgene comprises a sequence encoding a peptide sequence that is at least 90%, 91%, 92%, 93%, 94%, 95%, 96%, 97%, 98%, 99%, or 100% identical to any one of SEQ ID NOs: 182, 184, or 186 (or a portion thereof). In some embodiments, a SACA gene and/or transgene comprises a nucleotide sequence that is at least 90%, 91%, 92%, 93%, 94%, 95%, 96%, 97%, 98%, 99%, or 100% identical to any one of SEQ ID NOs: 183 or 185 (or a portion thereof).

-Exemplary Pseudomonas putida glycolaldehyde synthase (GALS) Amino
Acid Sequence
SEQ ID NO: 182
MGSSHHHHHHSSGLVPRGSHMMASVHGTTYELLRRQGIDTVFGNPGSNELPFLKDFPEDFRYIL
ALQEACVVGIADGYAQASRKPAFINLHSAAGTGNAMGALSNARTSHSPLIVTAGQQTRAMIGVE
AGETNVDAANLPRPLVKWSYEPASAAEVPHAMSRAIHMASMAPQGPVYLSVPYDDWDKDADPQS
HHLFDRHVSSSVRLNDQDLDILVKALNSASNPAIVLGPDVDAANANADCVMLAERLKAPVWVAP
SAPRCPFPTRHPCFRGLMPAGIAAISQLLEGHDVVLVIGAPVFRYVFYDPGQYLKPGTRLISVT
CDPLEAARAPMGDAIVADIGAMASALANLVEESSRQLPTAAPEPAKVDQDAGRLHPETVEDTLN
DMAPENAIYLNESTSTTAQMWQRLNMRNPGSYYFCAAGGLGFALPAAIGVQLAEPERQVIAVIG
DGSANYSISALWTAAQYNIPTIFVIMNNGTYGMLRWFAGVLEAENVPGLDVPGIDFRALAKGYG
VQALKADNLEQLKGSLQEALSAKGPVLIEVSTVSPVK
-Exemplary Bifidobacterium breve acetyl-phosphate synthase
(phosphoketolase) (ACPS) Nucleic Acid Coding Sequence
SEQ ID NO: 183
ATGACAAATCCTGTTATTGGCACCCCGTGGCAGAAGCTGGATCGCCCGGTTTCCGAAGAAGCCA
TCGAAGGCATGGACAAGTATTGGCGCGTCACCAACTACATGTCCATCGGCCAGATCTATCTGCG
TAGCAACCCGCTGATGAAGGAACCCTTCACCCGCGATGACGTGAAGCACCGTCTGGTCGGCCAC
TGGGGCACCACCCCGGGCCTGAACTTCCTTCTCGCCCACATCAACCGCCTCATCGCTGACCACC
AGCAGAACACCGTGTTCATCATGGGCCCGGGCCACGGCGGCCCGGCTGGCACCTCCCAGTCTTA
CGTTGACGGCACGTACACCGAGTACTACCCGAACATCACCAAGGACGAAGCTGGCCTGCAGAAG
TTCTTCCGCCAGTTCTCCTACCCGGGCGGCATCCCGTCGCACTTCGCCCCGGAGACCCCGGGAT
CGATCCACGAAGGTGGCGAGCTTGGCTACGCGCTCTCCCACGCATACGGCGCCGTGATGAACAA
CCCGAGCCTGTTCGTGCCGTGCATCATCGGCGACGGCGAGGCCGAGACCGGCCCGCTCGCCACC
GGCTGGCAGTCCAACAAGCTCGTCAACCCGCGCACCGACGGCATCGTGCTGCCGATCCTGCACC
TCAACGGCTACAAGATCGCCAACCCGACCATCCTCGCTCGTATCTCCGACGAAGAGCTGCATGA
CTTCTTCCGCGGCATGGGCTACCACCCGTACGAGTTCGTTGCCGGCTTCGACAACGAGGACCAC
ATGTCGATCCACCGTCGTTTCGCCGAGCTGTTCGAGACGATCTTCGACGAGATCTGCGACATCA
AGGCTGCGGCCCAGACCGACGACATGACCCGTCCGTTCTACCCGATGCTCATCTTCCGCACCCC
GAAGGGCTGGACCTGCCCGAAGTTCATCGACGGCAAGAAGACCGAAGGCTCCTGGCGTGCGCAC
CAGGTCCCGCTGGCTTCCGCCCGCGACACCGAAGAGCACTTCGAAGTCCTCAAGGGCTGGATGG
AATCCTACAAGCCGGAAGAGCTCTTCAACGCCGACGGCTCCATCAAGGATGACGTCACCGCGTT
CATGCCGAAGGGCGAGCTCCGCATCGGCGCCAACCCGAACGCCAACGGTGGTGTGATCCGCGAG
GACCTGAAGCTCCCCGAGCTCGACCAGTACGAGGTCACCGGCGTCAAGGAGTACGGCCATGGCT
GGGGCCAGGTCGAGGCTCCGCGTGCCCTCGGTGCATACTGCCGCGACATCATCAAGAACAACCC
GGATTCGTTCCGCATCTTCGGACCGGACGAGACCGCTTCCAACCGCCTGAACGCGACCTACGAG
GTCACCGACAAGCAGTGGGACAACGGCTACCTTTCGGGTCTCGTCGACGAGCACATGGCGGTCA
CCGGTCAGGTCACCGAGCAGCTCTCCGAGCACCAGTGCGAGGGCTTCCTCGAGGCGTACCTCCT
CACCGGCCGCCACGGCATCTGGAGCTCCTACGAGTCCTTCGTCCACGTCATCGACTCGATGCTC
AACCAGCATGCGAAGTGGCTCGAGGCCACCGTCCGCGAGATCCCGTGGCGCAAGCCGATCTCCT
CGGTGAACCTCCTCGTCTCCTCGCACGTGTGGCGTCAGGATCACAACGGCTTCTCGCACCAGGA
TCCGGGTGTCACCTCGCTCCTGATCAACAAGACGTTCAACAACGATCACGTGACGAACATCTAC
TTCGCGACCGACGCGAACATGCTGCTCGCGATCTCCGAGAAGTGCTTCAAGTCCACCAACAAGA
TCAATGCGATCTTCGCCGGCAAGCAGCCTGCTCCGACGTGGGTCACGCTCGATGAGGCCCGCGC
CGAGCTCGAAGCCGGCGCCGCTGAGTGGAAGTGGGCTTCCAACGCCGAGAACAACGATGAGGTC
CAGGTCGTCCTCGCTTCCGCTGGCGATGTGCCGACCCAGGAGCTCATGGCCGCCTCCGATGCCC
TCAACAAGATGGGCATCAAGTTCAAGGTCGTCAACGTTGTTGACCTCCTGAAGCTGCAGTCCCG
CGAGAACAACGACGAGGCCCTCACGGACGAGGAGTTCACCGAACTCTTCACCGCCGACAAGCCG
GTTCTGTTCGCATACCACTCCTACGCTCAGGATGTTCGCGGCCTCATCTACGACCGCCCGAACC
ACGACAACTTCCACGTCGTCGGCTACAAGGAGCAGGGCTCCACGACCACGCCGTTCGACATGGT
CCGCGTCAACGACATGGATCGCTATGCGCTCCAGGCCGCTGCCCTCAAGCTGATCGATGCCGAC
AAGTACGCCGACAAGATCGACGAGCTCAACGCGTTCCGCAAGAAGGCGTTCCAGTTCGCTGTCG
ACAACGGCTACGACATCCCGGAGTTCACCGACTGGGTGTACCCGGATGTCAAGGTCGACGAGAC
GCAGATGCTTTCCGCGACCGCGGCGACCGCAGGCGACAACGAGTGA
-Exemplary Bifidobacterium breve acetyl-phosphate synthase
(phosphoketolase) (ACPS) Amino Acid Sequence
SEQ ID NO: 184
MTNPVIGTPWQKLDRPVSEEAIEGMDKYWRVTNYMSIGQIYLRSNPLMKEPFTRDDVKHRLVGH
WGTTPGLNFLLAHINRLIADHQQNTVFIMGPGHGGPAGTSQSYVDGTYTEYYPNITKDEAGLQK
FFRQFSYPGGIPSHFAPETPGSIHEGGELGYALSHAYGAVMNNPSLFVPCIIGDGEAETGPLAT
GWQSNKLVNPRTDGIVLPILHLNGYKIANPTILARISDEELHDFFRGMGYHPYEFVAGFDNEDH
MSIHRRFAELFETIFDEICDIKAAAQTDDMTRPFYPMLIFRTPKGWTCPKFIDGKKTEGSWRAH
QVPLASARDTEEHFEVLKGWMESYKPEELFNADGSIKDDVTAFMPKGELRIGANPNANGGVIRE
DLKLPELDQYEVTGVKEYGHGWGQVEAPRALGAYCRDIIKNNPDSFRIFGPDETASNRLNATYE
VTDKQWDNGYLSGLVDEHMAVTGQVTEQLSEHQCEGFLEAYLLTGRHGIWSSYESFVHVIDSML
NQHAKWLEATVREIPWRKPISSVNLLVSSHVWRQDHNGFSHQDPGVTSLLINKTENNDHVTNIY
FATDANMLLAISEKCFKSTNKINAIFAGKQPAPTWVTLDEARAELEAGAAEWKWASNAENNDEV
QVVLASAGDVPTQELMAASDALNKMGIKFKVVNVVDLLKLQSRENNDEALTDEEFTELFTADKP
VLFAYHSYAQDVRGLIYDRPNHDNFHVVGYKEQGSTTTPFDMVRVNDMDRYALQAAALKLIDAD
KYADKIDELNAFRKKAFQFAVDNGYDIPEFTDWVYPDVKVDETQMLSATAATAGDNE
-Exemplary Escherichia coli phosphate acetyltransferase (PTA) Nucleic
Acid Coding Sequence
SEQ ID NO: 185
ATGTCCCGTATTATTATGCTGATCCCTACCGGAACCAGCGTCGGTCTGACCAGCGTCAGCCTTG
GCGTGATCCGTGCAATGGAACGCAAAGGCGTTCGTCTGAGCGTTTTCAAACCTATCGCTCAGCC
GCGTACCGGTGGCGATGCGCCCGATCAGACTACGACTATCGTGCGTGCGAACTCTTCCACCACG
ACGGCCGCTGAACCGCTGAAAATGAGCTACGTTGAAGGTCTGCTTTCCAGCAATCAGAAAGATG
TGCTGATGGAAGAGATCGTCGCAAACTACCACGCTAACACCAAAGACGCTGAAGTCGTTCTGGT
TGAAGGTCTGGTCCCGACACGTAAGCACCAGTTTGCCCAGTCTCTGAACTACGAAATCGCTAAA
ACGCTGAATGCGGAAATCGTCTTCGTTATGTCTCAGGGCACTGACACCCCGGAACAGCTGAAAG
AGCGTATCGAACTGACCCGCAACAGCTTCGGCGGTGCCAAAAACACCAACATCACCGGCGTTAT
CGTTAACAAACTGAACGCACCGGTTGATGAACAGGGTCGTACTCGCCCGGATCTGTCCGAGATT
TTCGACGACTCTTCCAAAGCTAAAGTAAACAATGTTGATCCGGCGAACGTGCAAGAATCCAGCC
CGCTGCCGGTTCTCGGCGCTGTGCCGTGGAGCTTTGACCTGATCGCGACTCGTGCGATCGATAT
GGCTCGCCACCTGAATGCGACCATCATCAACGAAGGCGACATCAATACTCGCCGCGTTAAATCC
GTCACTTTCTGCGCACGCAGCATTCCGCACATGCTGGAGCACTTCCGTGCCGGTTCTCTGCTGG
TGACTTCCGCAGACCGTCCTGACGTGCTGGTGGCCGCTTGCCTGGCAGCCATGAACGGCGTAGA
AATCGGTGCCCTGCTGCTGACTGGCGGTTACGAAATGGACGCGCGCATTTCTAAACTGTGCGAA
CGTGCTTTCGCTACCGGCCTGCCGGTATTTATGGTGAACACCAACACCTGGCAGACCTCTCTGA
GCCTGCAGAGCTTCAACCTGGAAGTTCCGGTTGACGATCACGAACGTATCGAGAAAGTTCAGGA
ATACGTTGCTAACTACATCAACGCTGACTGGATCGAATCTCTGACTGCCACTTCTGAGCGCAGC
CGTCGTCTGTCTCCGCCTGCGTTCCGTTATCAGCTGACTGAACTTGCGCGCAAAGCGGGCAAAC
GTATCGTACTGCCGGAAGGTGACGAACCGCGTACCGTTAAAGCAGCCGCTATCTGTGCTGAACG
TGGTATCGCAACTTGCGTACTGCTGGGTAATCCGGCAGAGATCAACCGTGTTGCAGCGTCTCAG
GGTGTAGAACTGGGTGCAGGGATTGAAATCGTTGATCCAGAAGTGGTTCGCGAAAGCTATGTTG
GTCGTCTGGTCGAACTGCGTAAGAACAAAGGCATGACCGAAACCGTTGCCCGCGAACAGCTGGA
AGACAACGTGGTGCTCGGTACGCTGATGCTGGAACAGGATGAAGTTGATGGTCTGGTTTCCGGT
GCTGTTCACACTACCGCAAACACCATCCGTCCGCCGCTGCAGCTGATCAAAACTGCACCGGGCA
GCTCCCTGGTATCTTCCGTGTTCTTCATGCTGCTGCCGGAACAGGTTTACGTTTACGGTGACTG
TGCGATCAACCCGGATCCGACCGCTGAACAGCTGGCAGAAATCGCGATTCAGTCCGCTGATTCC
GCTGCGGCCTTCGGTATCGAACCGCGCGTTGCTATGCTCTCCTACTCCACCGGTACTTCTGGTG
CAGGTAGCGACGTAGAAAAAGTTCGCGAAGCAACTCGTCTGGCGCAGGAAAAACGTCCTGACCT
GATGATCGACGGTCCGCTGCAGTACGACGCTGCGGTAATGGCTGACGTTGCGAAATCCAAAGCG
CCGAACTCTCCGGTTGCAGGTCGCGCTACCGTGTTCATCTTCCCGGATCTGAACACCGGTAACA
CCACCTACAAAGCGGTACAGCGTTCTGCCGACCTGATCTCCATCGGGCCGATGCTGCAGGGTAT
GCGCAAGCCGGTTAACGACCTGTCCCGTGGCGCACTGGTTGACGATATCGTCTACACCATCGCG
CTGACTGCGATTCAGTCTGCACAGCAGCAGTAA
-Exemplary Escherichia coli phosphate acetyltransferase (PTA) Amino
Acid Sequence
SEQ ID NO: 186
MSRIIMLIPTGTSVGLTSVSLGVIRAMERKGVRLSVFKPIAQPRTGGDAPDQTTTIVRANSSTT
TAAEPLKMSYVEGLLSSNQKDVLMEEIVANYHANTKDAEVVLVEGLVPTRKHQFAQSLNYEIAK
TLNAEIVFVMSQGTDTPEQLKERIELTRNSFGGAKNTNITGVIVNKLNAPVDEQGRTRPDLSEI
FDDSSKAKVNNVDPAKLQESSPLPVLGAVPWSEDLIATRAIDMARHLNATIINEGDINTRRVKS
VTFCARSIPHMLEHFRAGSLLVTSADRPDVLVAACLAAMNGVEIGALLLIGGYEMDARISKLCE
RAFATGLPVFMVNTNTWQTSLSLQSFNLEVPVDDHERIEKVQEYVANYINADWIESLTATSERS
RRLSPPAFRYQLTELARKAGKRIVLPEGDEPRTVKAAAICAERGIATCVLLGNPAEINRVAASQ
GVELGAGIEIVDPEVVRESYVGRLVELRKNKGMTETVAREQLEDNVVLGTLMLEQDEVDGLVSG
AVHTTANTIRPPLQLIKTAPGSSLVSSVFFMLLPEQVYVYGDCAINPDPTAEQLAEIAIQSADS
AAAFGIEPRVAMLSYSTGTSGAGSDVEKVREATRLAQEKRPDLMIDGPLQYDAAVMADVAKSKA
PNSPVAGRATVFIFPDLNTGNTTYKAVQRSADLISIGPMLQGMRKPVNDLSRGALVDDIVYTIA
LTAIQSAQQQ

### B) Propanediol Pathway Enzymes (Aldolase)

[0367] In certain embodiments, a composition described herein comprises at least one transgenic aldolase pathway enzyme. In certain embodiments, aldolase enzymes metabolize substrates such as formaldehyde, pyruvate, 2-keto-4-hydroxybutyrate (HOBA), and/or 3-hydroxypropionaldehyde (3-HPA) to create products such as 2-keto-4-hydroxybutyrate (HOBA), 3-hydroxypropionaldehyde (3-HPA), and/or 1,3-propanediol (1,3-PDO). In certain embodiments, 1,3-PDO is further utilized in metabolic processes in the host cell.

[0368] In some embodiments, an aldolase gene and/or transgene comprises a sequence encoding a peptide sequence that is at least 90%, 91%, 92%, 93%, 94%, 95%, 96%, 97%, 98%, 99%, or 100% identical to any one of SEQ ID NOs: 188, 190, or 192 (or a portion thereof). In some embodiments, an aldolase gene and/or transgene comprises a nucleotide sequence that is at least 90%, 91%, 92%, 93%, 94%, 95%, 96%, 97%, 98%, 99%, or 100% identical to any one of SEQ ID NOs: 187, 189, or 191 (or a portion thereof).

-Exemplary Escherichia coli K-12, 4-hydroxy-2-oxoglutarate aldolase/2-
dehydro-3-deoxy-phosphogluconate aldolase (KHB) Nucleic Acid Coding Sequence
SEQ ID NO: 187
ATGAAAAACTGGAAAACAAGTGCAGAATCAATCCTGACCACCGGCCCGGTTGTACCGGTTATCG
TGGTAAAAAAACTGGAACACGCGGTGCCGATGGCAAAAGCGTTGGTTGCTGGTGGGGTGCGCGT
TCTGGAAGTGACTCTGCGTACCGAGTGTGCAGTTGACGCTATCCGTGCTATCGCCAAAGAAGTG
CCTGAAGCGATTGTGGGTGCCGGTACGGTGCTGAATCCACAGCAGCTGACAGAAGTCACTGAAG
CGGGTGCACAGTTCGCAATTAGCCCGGGTCTGACCGAGCCGCTGCTGAAAGCTGCTACCGAAGG
GACTATTCCTCTGATTCCGGGGATCAGCACTGTTTCCGAACTGATGCTGGGTATGGACTACGGT
TTGAAAGAGTTCAAATTCTTCCCGGCTGAAGCTAACGGCGGCGTGAAAGCCCTGCAGGCGATCG
CGGGTCCGTTCTCCCAGGTCCGTTTCTGCCCGACGGGTGGTATTTCTCCGGCTAACTACCGTGA
CTACCTGGCGCTGAAAAGCGTGCTGTGCATCGGTGGTTCCTGGCTGGTTCCGGCAGATGCGCTG
GAAGCGGGCGATTACGACCGCATTACTAAGCTGGCGCGTGAAGCTGTAGAAGGCGCTAAGCTGT
AA
-Exemplary Escherichia coli K-12, 4-hydroxy-2-oxoglutarate aldolase/2-
dehydro-3-deoxy-phosphogluconate aldolase (KHB) Amino Acid Sequence
SEQ ID NO: 188
MKNWKTSAESILTTGPVVPVIVVKKLEHAVPMAKALVAGGVRVLEVTLRTECAVDAIRAIAKEV
PZAIVGAGTVLNPQQLAEVTEAGAQFAISPGLTEPLLKAATEGTIPLIPGISTVSELMLGMDYG
LKEFKFFPAEANGGVKALQAIAGPFSQVRFCPTGGISPANYRDYLALKSVLCIGGSWLVPADAL
EAGDYDRITKLAREAVEGAKL
-Exemplary Lactococcus lactis branched-chain alpha-keto acid
decarboxylase (KDC) Nucleic Acid Coding Sequence
SEQ ID NO: 189
ATGTATACAGTAGGAGATTACCTGTTAGACCGATTACACGAGTTGGGAATTGAAGAAATTTTTG
GAGTTCCTGGTGACTATAACTTACAATTTTTAGATCAAATTATTTCACGCGAAGATATGAAATG
GATTGGAAATGCTAATGAATTAAATGCTTCTTATATGGCTGATGGTTATGCTCGTACTAAAAAA
GCTGCCGCATTTCTCACCACATTTGGAGTCGGCGAATTGAGTGCGATCAATGGACTGGCAGGAA
GTTATGCCGAAAATTTACCAGTAGTAGAAATTGTTGGTTCACCAACTTCAAAAGTACAAAATGA
CGGAAAATTTGTCCATCATACACTAGCAGATGGTGATTTTAAACACTTTATGAAGATGCATGAA
CCTGTTACAGCAGCGCGGACTTTACTGACAGCAGAAAATGCCACATATGAAATTGACCGAGTAC
TTTCTCAATTACTAAAAGAAAGAAAACCAGTCTATATTAACTTACCAGTCGATGTTGCTGCAGC
AAAAGCAGAGAAGCCTGCATTATCTTTAGAAAAAGAAAGCTCTACAACAAATACAACTGAACAA
GTGATTTTGAGTAAGATTGAAGAAAGTTTGAAAAATGCCCAAAAACCAGTAGTGATTGCAGGAC
ACGAAGTAATTAGTTTTGGTTTAGAAAAAACGGTAACTCAGTTTGTTTCAGAAACAAAACTACC
GATTACGACACTAAATTTTGGTAAAAGTGCTGTTGATGAATCTTTGCCCTCATTTTTAGGAATA
TATAACGGGAAACTTTCAGAAATCAGTCTTAAAAATTTTGTGGAGTCCGCAGACTTTATCCTAA
TGCTTGGAGTGAAGCTTACGGACTCCTCAACAGGTGCATTCACACATCATTTAGATGAAAATAA
AATGATTTCACTAAACATAGATGAAGGAATAATTTTCAATAAAGTGGTAGAAGATTTTGATTTT
AGAGCAGTGGTTTCTTCTTTATCAGAATTAAAAGGAATAGAATATGAAGGACAATATATTGATA
AGCAATATGAAGAATTTATTCCATCAAGTGCTCCCTTATCACAAGACCGTCTATGGCAGGCAGT
TGAAAGTTTGACTCAAAGCAATGAAACAATCGTTGCTGAACAAGGAACCTCATTTTTTGGAGCT
TCAACAATTTTCTTAAAATCAAATAGTCGTTTTATTGGACAACCTTTATGGGGTTCTATTGGAT
ATACTTTTCCAGCGGCTTTAGGAAGCCAAATTGCGGATAAAGAGAGCAGACACCTTTTATTTAT
TGGTGATGGTTCACTTCAACTTACCGTACAAGAATTAGGACTATCAATCAGAGAAAAACTCAAT
CCAATTTGTTTTATCATAAATAATGATGGTTATACAGTTGAAAGAGAAATCCACGGACCTACTC
AAAGTTATAACGACATTCCAATGTGGAATTACTCGAAATTACCAGAAACATTTGGAGCAACAGA
AGATCGTGTAGTATCAAAAATTGTTAGAACAGAGAATGAATTTGTGTCTGTCATGAAAGAAGCC
CAAGCAGATGTCAATAGAATGTATTGGATAGAACTAGTTTTGGAAAAAGAAGATGCGCCAAAAT
TACTGAAAAAAATGGGTAAATTATTTGCTGAGCAAAATAAATAG
-Exemplary Lactococcus lactis branched-chain alpha-keto acid
decarboxylase (KDC) Amino Acid Sequence
SEQ ID NO: 190
MYTVGDYLLDRLHELGIEEIFGVPGDYNLQFLDQIISREDMKWIGNANELNASYMADGYARTKK
AAAFLTTFGVGELSAINGLAGSYAENLPVVEIVGSPTSKVQNDGKFVHHTLADGDFKHFMKMHE
PVTAARTLLTAENATYEIDRVLSQLLKERKPVYINLPVDVAAAKAEKPALSLEKESSTINTTEQ
VILSKIEESLKNAQKPVVIAGHEVISFGLEKTVTQFVSETKLPITTLNFGKSAVDESLPSFLGI
YNGKLSEISLKNFVESADFILMLGVKLTDSSTGAFTHHLDENKMISLNIDEGIIFNKVVEDFDF
RAVVSSLSELKGIEYEGQYIDKQYEEFIPSSAPLSQDRLWQAVESLTQSNETIVAEQGTSFFGA
STIFLKSNSRFIGQPLWGSIGYTFPAALGSQIADKESRHLLFIGDGSLQLTVQELGLSIREKLN
PICFIINNDGYTVEREIHGPTQSYNDIPMWNYSKLPETFGATEDRVVSKIVRTENEFVSVMKEA
QADVNRMYWIELVLEKEDAPKLLKKMGKLFAEQNK
-Exemplary K. pneumoniae DSM 2026 NADH-dependent 1,3-PDO
oxidoreductase (DhaT) Nucleic Acid Coding Sequence
SEQ ID NO: 191
ATGAGCTATCGTATGTTTGATTATCTGGTGCCAAACGTTAACTTTTTTGGCCCCAACGCCATTT
CCGTAGTCGGCGAACGCTGCCAGCTGCTGGGGGGGAAAAAAGCCCTGCTGGTCACCGACAAAGG
CCTGCGGGCAATTAAAGATGGCGCGGTGGACAAAACCCTGCATTATCTGCGGGAGGCCGGGATC
GAGGTGGCGATCTTTGACGGCGTCGAGCCGAACCCGAAAGACACCAACGTGCGCGACGGCCTCG
CCGTGTTTCGCCGCGAACAGTGCGACATCATCGTCACCGTGGGCGGCGGCAGCCCGCACGATTG
CGGCAAAGGCATCGGCATCGCCGCCACCCATGAGGGCGATCTGTACCAGTATGCCGGAATCGAG
ACCCTGACCAACCCGCTGCCGCCTATCGTCGCGGTCAATACCACCGCCGGCACCGCCAGCGAGG
TCACCCGCCACTGCGTCCTGACCAACACCGAAACCAAAGTGAAGTTTGTGATCGTCAGCTGGCG
CAACCTGCCGTCGGTCTCTATCAACGATCCACTGCTGATGATCGGTAAACCGGCCGCCCTGACC
GCGGCGACCGGGATGGATGCCCTGACCCACGCCGTAGAGGCCTATATCTCCAAAGACGCTAACC
CGGTGACGGACGCCGCCGCCATGCAGGCGATCCGCCTCATCGCCCGCAACCTGCGCCAGGCCGT
GGCCCTCGGCAGCAATCTGCAGGCGCGGGAAAACATGGCCTATGCTTCTCTGCTGGCCGGGATG
GCTTTCAATAACGCCAACCTCGGCTACGTGCACGCCATGGCGCACCAGCTGGGCGGCCTGTACG
ACATGCCGCACGGCGTGGCCAACGCTGTCCTGCTGCCGCATGTGGCGCGCTACAACCTGATCGC
CAACCCGGAGAAATTCGCCGATATCGCTGAACTGATGGGCGAAAATATCACCGGACTGTCCACT
CTCGACGCGGCGGAAAAAGCCATCGCCGCTATCACGCGTCTGTCGATGGATATCGGTATTCCGC
AGCATCTGCGCGATCTGGGGGTAAAAGAGGCCGACTTCCCCTACATGGCGGAGATGGCTCTAAA
AGACGGCAATGCGTTCTCGAACCCGCGTAAAGGCAACGAGCAGGAGATTGCCGCGATTTTCCGC
CAGGCATTCTGA
-Exemplary K. pneumoniae DSM 2026 NADH-dependent 1,3-PDO
oxidoreductase (DhaT) Amino Acid Sequence
SEQ ID NO: 192
MSYRMFDYLVPNVNFFGPNAISVVGERCQLLGGKKALLVTDKGLRAIKDGAVDKTLHYLREAGI
EVAIFDGVEPNPKDTNVRDGLAVFRREQCDIIVTVGGGSPHDCGKGIGIAATHEGDLYQYAGIE
TLTNPLPPIVAVNTTAGTASEVTRHCVLINTETKVKFVIVSWRNLPSVSINDPLLMIGKPAALT
AATGMDALTHAVEAYISKDANPVTDAAAMQAIRLIARNLRQAVALGSNLQAREYMAYASLLAGM
AFNNANLGYVHAMAHQLGGLYDMPHGVANAVLLPHVARYNLIANPEKFADIAELMGENITGLST
LDAAEKAIAAITRLSMDIGIPQHLRDLGVKETDFPYMAEMALKDGNAFSNPRKGNEQEIAAIFR
QAF

### C) Methanol or Aldehyde Dehydrogenase Enzymes

[0369] In certain embodiments, a composition described herein comprises at least one transgenic methanol and/or aldehyde dehydrogenase enzyme. In certain embodiments, methanol and/or aldehyde dehydrogenase enzymes metabolize substrates such as formaldehyde, and/or aldehyde to create products such as methanol, and/or carboxylate. In certain embodiments, methanol, and/or carboxylate is further utilized in metabolic processes in the host cell.

[0370] In some embodiments, a methanol and/or aldehyde dehydrogenase gene and/or transgene comprises a sequence encoding a peptide sequence that is at least 90%, 91%, 92%, 93%, 94%, 95%, 96%, 97%, 98%, 99%, or 100% identical to any one of SEQ ID NOs: 194, 196, or 198 (or a portion thereof). In some embodiments, a methanol and/or aldehyde dehydrogenase gene and/or transgene comprises a nucleotide sequence that is at least 90%, 91%, 92%, 93%, 94%, 95%, 96%, 97%, 98%, 99%, or 100% identical to any one of SEQ ID NOs: 193, 195, or 197 (or a portion thereof).

-Exemplary Methylobacterium sp. XJLW Methanol dehydrogenase
(MDH-12) Nucleic Acid Coding Sequence
SEQ ID NO: 193
ATGAGAGCGGTACATCTCCTTGCGCTCGGCGCAGGTGTCGCGGCCGTCGCCGCGCCGGCGCTGG
CCAATGAAAGCGTCATGAAGGGCATCGCCAACCCGGCGGAACAGGTTCTTCAGACGGTTGATTA
CGCGAATACGCGTTATTCGAAGCTCGACCAGATCAACGCCAAGAACGTCAAGGATCTCCAGGTC
GCCTGGACGTTCTCGACCGGCGTTCTGCGCGGCCACGAGGGCTCGCCGCTCGTCGTCGGCAACA
TCATGTACGTGCACACGCCGTTCCCGAACATCGTGTACGCCCTCGACCTCGACCACGAGGCGAA
GATCATCTGGAAGTACGAGCCGAAGCAGGATCCGTCCGTGATCCCGGTCATGTGCTGTGACACG
GTCAACCGTGGCCTGGCCTACGCCGACGGCGCCATCCTCCTGCACCAGGCCGACACCACCCTCG
TGTCGCTCGACGCCAAGACCGGCAAGGTCAACTGGTCGGTCGTGAACGGCGATCCGAAGAAGGG
CGAGACCAACACCGCCACGGTTCTGCCCGTGAAGGACAAGGTCATCGTCGGCATCTCCGGCGGC
GAGTTCGGCGTGCAGTGCCACGTCACCGCCTACGACCTGAAGACCGGCAAGAAGGTGTGGCGCG
GCTACTCCGAGGGCCCGGACGATCAGATGATCGTGGACCCGGAGAAGACCACGTCGCTCGGCAA
GCCGATCGGCAAGGACTCCTCGCTGAAGACCTGGGAAGGCGATCAGTGGAAGACCGGCGGCGGC
TGCACCTGGGGCTGGTTCTCGTACGATCCGAAGCTCGACCTGATGTACTACGGCTCGGGCAACC
CCTCGACCTGGAACCCCAAGCAGCGTCCGGGCGACAACAAGTGGTCCATGACCATCTGGGCGCG
TAACCCGGATACCGGCATGGCCAAGTGGGTCTACCAGATGACCCCGCACGACGAGTGGGACTAC
GACGGCATCAACGAGATGATCCTCACGGATCAGAAGGTTGACGGCAAGGACCAGCCGCTCCTGA
CCCACTTCGACCGTAACGGCTTCGGCTACACGCTGAACCGCGAGACCGGCGCCCTGCTCGTCGC
CGAGAAGTTCGACCCGGCCGTCAACTGGGCGTCCAAGGTCGACATGGACAAGGGCTCGAAGAAC
TACGGCCGTCCGCTGGTCGTGTCGAAGTACTCGACCGAGCAGAACGGTGAGGACACCAACTCCA
AGGGCATCTGCCCGGCGGCGCTGGGCACCAAGGATCAGCAGCCTGCGGCCTTCTCGCCGAAGAC
CAACCTGTTCTACGTGCCCACCAACCACGTCTGCATGGACTACGAGCCGTTCCGGGTGACCTAC
ACCCCGGGCCAGCCCTACGTCGGTGCGACCCTCTCGATGTACCCGGCCCCGAACTCGCACGGCG
GCATGGGCAACTTCATCGCGTGGGATGGCGTCAACGGCAAGATCAAGTGGTCCAACCCCGAGCA
GTTCTCGGTGTGGTCCGGTGCTCTGGCCACCGCTGGCGACGTCGTGTTCTACGGCACGCTTGAG
GGCTACCTGAAGGCGGTCGACGACAAGACCGGCAAGGAGCTGTTCAAGTTCAAGACCCCGTCGG
GCATCATCGGTAACGTGATGACCTACCAGCACAAGGGCAAGCAGTACGTGGGCGTCCTGTCGGG
CGTCGGCGGCTGGGCTGGCATCGGCCTCGCGGCCGGCCTGACCGACCCGAACGCCGGCCTCGGC
GCGGTGGGTGGCTACGCGGCTCTGTCGCAGTACACCAACCTCGGCGGCCAGCTGACGGTCTTCG
CCCTGCCGAACTAA
-Exemplary Methylobacterium sp. XJLW Methanol dehydrogenase
(MDH-12) Amino Acid Sequence
SEQ ID NO: 194
MRAVHLLALGAGVAAVAAPALANESVMKGIANPAEQVLQTVDYANTRYSKLDQINAKNVKDLQV
AWTFSTGVLRGHEGSPLVVGNIMYVHTPFPNIVYALDLDHEAKIIWKYEPKQDPSVIPVMCCDT
VNRGLAYADGAILLHQADTTLVSLDAKTGKVNWSVVNGDPKKGETNTATVLPVKDKVIVGISGG
EFGVQCHVTAYDLKTGKKVWRGYSEGPDDQMIVDPEKTTSLGKPIGKDSSLKTWEGDQWKTGGG
CTWGWFSYDPKLDLMYYGSGNPSTWNPKQRPGDNKWSMTIWARNPDTGMAKWVYQMTPHDEWDY
DGINEMILTDQKVDGKDQPLLTHFDRNGFGYTLNRETGALLVAEKFDPAVNWASKVDMDKGSKN
YGRPLVVSKYSTEQNGEDTNSKGICPAALGTKDQQPAAFSPKTNLFYVPTNHVCMDYEPFRVTY
TPGQPYVGATLSMYPAPNSHGGMGNFIAWDGVNGKIKWSNPEQFSVWSGALATAGDVVFYGTLE
GYLKAVDDKTGKELFKFKTPSGIIGNVMTYQHKGKQYVGVLSGVGGWAGIGLAAGLTDPNAGLG
AVGGYAALSQYTNLGGQLTVFALPN
-Exemplary Methylobacterium sp. XJLW Aldehyde dehydrogenase
(ALDH-13) Nucleic Acid Coding Sequence
SEQ ID NO: 195
ATGAGAGCAATCGTCTATAATGGACCCCGCGATGTTTCGATGCAGGACGTGCCGGATGCGAAGA
TCGTGAAGCCGACCGACGTTCTGGTCCGCATCACGAGCACCAACATCTGCGGCTCCGACCTACA
TATGTACGAAGGCCGAACCGATTTTCCCCAAGGTGGCGTGTTCGGGCACGAGAACCTGGGACAG
GTGGCGGAAGTCGGCAGCGCCGTCGATCGGGTGCAGGTCGGGGACTGGGTCGCCGTCCCGTTCA
ACATCGGCTGCGGGTTCTGCGAAAACTGCGAGCGCGGCCTGAGCGCCTACTGCTTGACCACGGC
GGATCGAAGCGTCGTGCCGAACATGGCGGGCGCGGCCTACGGCTTTGCCGGCATGGGACCGTAT
CGCGGCGGTCAGGCCGATTTTCTGCGCGTCCCCTATGGCGACTATAACTGTCTGCAGCTGCCGC
CGGACGCGGAGGAGAGGCAGAACGACTATGTCATGCTGGCCGACATCTTTCCGACCGGCTGGCA
CTGCACGGAACTCGCAGGCGTGAAGCCCGGCGAAACCGTTGTGGTTTACGGGGCCGGGCCGGTC
GGTCTCATGGCCGCCTACTCGGCGATGATCAAGGGTGCGTCCCTGGTCATGGTTGTCGATCGCC
ATCCCGACCGGCTGCGCCTCGCCGAATCGATCGGTGCCGTGACCATCGACGATTCCAAGGACTC
CCCGGTGGACAAGGTGCTTGAGTTGACGAAGGGCGTCGGCGCCGACCGCGGCTGCGAGTGCGTC
GGCTACCAAGCGCACGACCCCAGCGGCCAGGAGCGCCCCAATATGACCATGAACGACTTGGTCA
AGTCGGTGAAATTCACCGGCGGCATCGGCGTGGTCGGCGTCTTCACGCCCCAGGATCCGGCCCC
GCAGGACCCGCTCTACAAGCAGGGCGAGATTGTGTTCGACCACGGCCTCTTCTGGTTCAAAGGT
CAGACGATCGGCGTCGGCCAGTGCAACGTGAAGGCCTATAACCGGCAGTTGCGCGACCTCATCT
CGACCGGCCGGGCGAAGCCGTCCTTCATCGTCTCGCACGAGCTTCCGCTGGGAGAGGCGCCGAA
GGCCTACAAGCACTTCGACGCGCGCGACGATGGCTGGACCAAGGTGATCCTCAAGCCCGCCGCC
TGA
-Exemplary Methylobacterium sp. XJLW Aldehyde dehydrogenase
(ALDH-13) Amino Acid Sequence
SEQ ID NO: 196
MRAIVYNGPRDVSMQDVPDAKIVKPTDVLVRITSTNICGSDLHMYEGRTDFPQGGVFGHENLGQ
VAEVGSAVDRVQVGDWVAVPFNIGCGFCENCERGLSAYCLTTADRSVVPNMAGAAYGFAGMGPY
RGGQADFLRVPYGDYNCLQLPPDAEERQNDYVMLADIFPTGWHCTELAGVKPGETVVVYGAGPV
GLMAAYSAMIKGASLVMVVDRHPDRLRLAESIGAVTIDDSKDSPVDKVLELTKGVGADRGCECV
GYQAHDPSGQERPNMTMNDLVKSVKFTGGIGVVGVFTPQDPAPQDPLYKQGEIVFDHGLFWFKG
QTIGVGQCNVKAYNRQLRDLISTGRAKPSFIVSHELPLGEAPKAYKHFDARDDGWTKVILKPAA
-Exemplary Methylobacterium sp. XJLW Aldehyde dehydrogenase
(ALDH-14) Nucleic Acid Coding Sequence
SEQ ID NO: 197
ATGTCCGGCACGTCGCACTCGCCCGCCGCCGACCGGGTCGCCGCCCTCCTGACCGACTTCCTGC
CGGGCGGCCGCATCGGCAGCGTCGTGGCCGGCGAGGTCCTCGCCGGGACCGGCGCCGCCCTCGA
CCTCGTCAACCCCGCGGACGGCGGCGTGCTCGCGACCTTCGCCGATGCCGGGCCGTCGGTGGTC
GAGGCCGCGATGGCGGCGGCCCGCGACGCCCAGCGCGCGTGGTGGGGGATGAGCGCCGCCGCCC
GGGGCCGGGCCCTGTGGGCGGTCGCCGCCCTGGTCCGGCAGCACGCCGGGGCGCTCGCTGAGCT
GGAGACCCTCTCGGCCGGCAAGCCGATCCGCGACACGCGCGGCGAGGTCGCCAAGGTCGCCGAG
ATGTTCGAGTATTATGCCGGCTGGTGCGACAAGCTTCACGGCGACGTCATCCCGGTGCCGAGTT
CGCACCTGAACTACACCCGCCACGAGCCCTTCGGCACCGTGGTGCAGATCACCCCCTGGAACGC
GCCGATCTTCACCGCCGGCTGGCAGATCGCCCCGGCCCTCTGCGCCGGCAACGCCGTGGTGCTG
AAGCCCTCCGAGCTGACACCGCTGACCTCGCTGGCGCTGGGCCTGCTCTGCGACCGCGCCGAGG
GGATGCCCCGCGGCCTCGTCTCGGTGCTGGCCGGCGCCGGTCCGACCACGGGGGCCGCCGCGGT
GGCCCATCCCGACACCCGCCTCGTCGTGTTCGTCGGCTCGGCCGAGGCCGGCGCGCAGATCGCC
GCCGCGGCGGCCCGCGCCATCGTGCCGAGCGTGCTGGAGCTCGGCGGCAAGTCGGCCAACATCG
TGTTCGCCGACGCCGACCTCGACCGGGCGCTGATCGGCGCGCAGGCCGCGATCTTCGGCGGCGC
CGGCCAGAGCTGCGTGGCGGGCTCCCGCCTCCTCGTGCACCGTTCGATCCACGCGTCCTTCGTG
GAGCGCCTGTCCCACGCCGCCGCGCGCATCCCGGTGGGGGCGCCGACCGACCCGGCGACGCAGA
TCGGGCCGATCAACAACCGGCGCCAGCGCGACAAGATCGCCGGCATGGTCGAGGCCGCGGCGAG
CGCCGGCGCCACCATCGCGGCCGGCGGGGCCTGCCCCGCGTCCCTGCGGGACACGGGCGGCTTC
TATTTCGGCCCGACCATCGTGGACGGCGTCGCGCCGGACGCGGCGATCGCCCGGGAGGAGGTGT
TCGGCCCGGTCCTCACGGTCCTGCCGTTCGACGGCGAGGACGAGGCGGTGGCGCTGGCCAACGG
CACGCCCTACGGCCTCGCGGGCGCGGTCTGGACCGGCGACGGCGGTCGCGGCCACCGGGTCGCG
GCGGCTTTGCGGGCCGGAACGGTGTGGGTCAACGGCTACAAGACCATCAACGTGGCCTCGCCGT
TCGGCGGCTTCGGCCGCTCGGGCTTCGGCCGCTCCTCGGGCCGCGAGGCGCTGATGGCCTACAC
GCAGACCAAGAGCGTCTGGGTCGAGACCGCGGCCCAGCCGGCGGTGACCTTCGGCTACGTGGGC
TAG
-Exemplary Methylobacterium sp. XJLW Aldehyde dehydrogenase
(ALDH-14) Amino Acid Sequence
SEQ ID NO: 198
MSGTSHSPAADRVAALLTDFLPGGRIGSVVAGEVLAGTGAALDLVNPADGGVLATFADAGPSVV
EAAMAAARDAQRAWWGMSAAARGRALWAVAALVRQHAGALAELETLSAGKPIRDTRGEVAKVAE
MFEYYAGWCDKLHGDVIPVPSSHLNYTRHEPFGTVVQITPWNAPIFTAGWQIAPALCAGNAVVL
KPSELTPLTSLALGLLCDRAEGMPRGLVSVLAGAGPTTGAAAVAHPDTRLVVFVGSAEAGAQIA
AAAARAIVPSVLELGGKSANIVFADADLDRALIGAQAAIFGGAGQSCVAGSRLLVHRSIHASFV
ERLSHAAARIPVGAPTDPATQIGPINNRRQRDKIAGMVEAAASAGATIAAGGACPASLRDTGGF
YFGPTIVDGVAPDAAIAREEVFGPVLTVLPFDGEDEAVALANGTPYGLAGAVWTGDGGRGHRVA
AALRAGTVWVNGYKTINVASPFGGFGRSGFGRSSGREALMAYTQTKSVWVETAAQPAVTFGYVG

### D) Xylulose Monophosphate Pathway

[0371] In some embodiments, compositions and methods described herein comprise introduction of one or more genes coding for dihydroxyacetone synthase (DAS), Formolase and/or dihydroxyacetone kinase (DAK). In some embodiments, these enzymes metabolize the substrates HCHO and/or D-xylulose 5-phosphate (Xu5P) to produce dihydroxyacetone (DHA), glyceraldehyde 3-phosphate (3PGA) Glycoaldehyde (GALD) and/or dihydroxyacetone phosphate (DHAP), a component that can be incorporated into the Calvin-Benson cycle, a photosynthetic carbon fixation pathway. In some embodiments, genes are introduced that comprise coding sequences for DAS-like and/or DAK-like proteins. In some embodiments, DAS and DAK function are incorporated into one enzyme, and only one gene is introduced that facilitates the conversion of formaldehyde and/or D-xylulose 5-phosphate (Xu5P) directly to glyceraldehyde 3-phosphate (3PGA) and DHAP.

### Dihydroxyacetone Synthase (DAS) and DAS-Like

[0372] In certain embodiments, a composition described herein comprises at least one transgenic DAS and/or DAS-like enzyme. In certain embodiments, DAS and/or DAS like proteins utilize Formaldehyde with D-xylulose 5-phosphate as a substrate and produce D-glyceraldehyde 3-phosphate and dihydroxyacetone.

[0373] In some embodiments, a DAS and/or DAS-like gene and/or transgene comprises a sequence encoding a peptide sequence that is at least 90%, 91%, 92%, 93%, 94%, 95%, 96%, 97%, 98%, 99%, or 100% identical to any one of SEQ ID NOs: 200, 202, 204, or 206 (or a portion thereof). In some embodiments, a DAS and/or DAS-like gene and/or transgene comprises a nucleotide sequence that is at least 90%, 91%, 92%, 93%, 94%, 95%, 96%, 97%, 98%, 99%, or 100% identical to any one of SEQ ID NOs: 199, 201, 203, or 205 (or a portion thereof).

-Exemplary Candida boidinii Dihydroxyacetone synthase (DASCanbo)
Nucleic Acid Coding Sequence
SEQ ID NO: 199
ATGGCTTTAGCTAAGGCTGCTTCTATAAATGATGACATCCACGATCTTACAATGAGAGCGTTCA
GATGCTACGTCCTTGACCTTGTCGAGCAATATGAGGGCGGTCACCCAGGTTCTGCCATGGGTAT
GGTCGCGATGGGTATCGCCCTATGGAAATACACTATGAAATACAGCACTAATGACCCAACGTGG
TTCAACAGGGATAGATTTGTATTATCCAACGGTCACGTCTGTCTTTTCCAATATCTCTTTCAGC
ACTTGAGTGGCTTAAAATCAATGACTGAGAAGCAGTTAAAGAGTTACCACTCTAGTGATTATCA
CTCAAAGTGTCCGGGACATCCGGAAATCGAGAATGAGGCCGTAGAGGTGACTACAGGCCCTCTT
GGTCAGGGCATATCGAATTCAGTTGGTCTGGCCATCGCCTCAAAGAATCTTGGTGCACTTTATA
ACAAACCTGGCTATGAAGTGGTAAACAACACCACATACTGCATTGTAGGCGATGCATGCCTTCA
AGAGGGGCCAGCCCTTGAGTCCATATCCTTCGCAGGGCACCTCGGACTCGACAATCTCGTCGTT
ATCTATGACAATAACCAAGTGTGTTGTGACGGTTCTGTGGATATTGCCAACACTGAGGATATTT
CAGCAAAGTTTCGAGCTTGTAATTGGAACGTGATCGAGGTCGAGGACGGCGCAAGGGATGTTGC
TACGATTGTTAAGGCTTTGGAGTTAGCAGGGGCCGAGAAGAACCGGCCAACTCTTATCAACGTG
CGGACGATAATTGGTACTGACTCAGCCTTTCAGAATCACTGCGCCGCGCATGGTTCTGCTCTGG
GTGAGGAAGGAATTCGTGAACTAAAGATAAAATACGGTTTCAATCCGAGCCAGAAATTCCATTT
TCCCCAGGAAGTATACGATTTCTTCTCGGACATTCCTGCAAAAGGTGACGAATACGTCTCCAAT
TGGAACAAGCTAGTGAGCTCATATGTTAAAGAGTTTCCAGAATTGGGCGCAGAATTCCAGTCTA
GGGTCAAGGGAGAACTTCCCAAGAACTGGAAATCTTTATTACCGAACAACTTGCCTAATGAGGA
CACTGCTACTCGAACAAGTGCACGTGCGATGGTGCGTGCGCTCGCTAAAGATGTGCCTAATGTG
ATCGCGGGGTCCGCGGACCTCTCCGTTTCAGTCAATCTACCTTGGCCGGGTAGCAAATATTTTG
AGAATCCACAATTAGCAACTCAGTGCGGACTAGCAGGTGACTATTCCGGAAGATACGTGGAATT
CGGTATAAGGGAACACTGTATGTGCGCGATCGCCAACGGGCTTGCTGCGTTCAACAAAGGTACT
TTCTTGCCAATAACTTCATCGTTCTACATGTTCTATCTCTATGCAGCTCCGGCCCTTAGGATGG
CTGCACTTCAAGAGCTCAAGGCCATTCACATCGCTACTCACGACTCTATCGGAGCTGGAGAGGA
CGGCCCAACGCACCAACCCATTGCTCAAAGCGCGCTTTGGCGAGCTATGCCAAACTTTTACTAC
ATGAGGCCCGGGGATGCAAGCGAGGTACGGGGACTCTTTGAGAAAGCAGTTGAATTGCCCTTAA
GTACCCTGTTCAGTTTAAGTCGGCACGAAGTGCCACAATACCCTGGCAAGAGCTCGATCGAGTT
GGCCAAGAGAGGCGGCTATGTGTTCGAAGATGCTAAAGATGCTGATATACAGCTTATCGGTGCG
GGAAGCGAACTCGAACAGGCCGTTAAAACTGCTCGAATACTCCGATCGAGAGGTCTTAAAGTCC
GTATCCTTAGCTTCCCATGTCAGCGTTTATTTGACGAGCAATCGGTGGGATACCGTAGAAGTGT
TCTTCAAAGAGGTAAGGTCCCGACTGTGGTGATCGAGGCATATGTTGCGTATGGATGGGAGAGA
TACGCTACTGCAGGTTATACTATGAACACGTTCGGAAAGTCCCTGCCGGTAGAGGATGTGTATG
AGTACTTTGGTTTCAATCCATCCGAAATCAGCAAGAAAATTGAGGGATATGTGAGAGCCGTCAA
AGCCAATCCAGATTTGCTCTACGAATTTATCGATCTCACAGAGAAGCCTAAACACGATCAAAAT
CACCTTTAA
-Exemplary Candida boidinii Dihydroxyacetone synthase (DASCanbo)
Amino Acid Sequence
SEQ ID NO: 200
MALAKAASINDDIHDLTMRAFRCYVLDLVEQYEGGHPGSAMGMVAMGIALWKYTMKYSTNDPTW
FNRDRFVLSNGHVCLFQYLFQHLSGLKSMTEKQLKSYHSSDYHSKCPGHPEIENEAVEVTTGPL
GQGISNSVGLAIASKNLGALYNKPGYEVVNNTTYCIVGDACLQEGPALESISFAGHLGLDNLVV
IYDNNQVCCDGSVDIANTEDISAKFRACNWNVIEVEDGARDVATIVKALELAGAEKNRPTLINV
RTIIGTDSAFQNHCAAHGSALGEEGIRELKIKYGFNPSQKFHFPQEVYDFFSDIPAKGDEYVSN
WNKLVSSYVKEFPELGAEFQSRVKGELPKNWKSLLPNNLPNEDTATRTSARAMVRALAKDVPNV
IAGSADLSVSVNLPWPGSKYFENPQLATQCGLAGDYSGRYVEFGIREHCMCAIANGLAAFNKGT
FLPITSSFYMFYLYAAPALRMAALQELKAIHIATHDSIGAGEDGPTHQPIAQSALWRAMPNFYY
MRPGDASEVRGLFEKAVELPLSTLFSLSRHEVPQYPGKSSIELAKRGGYVFEDAKDADIQLIGA
GSELEQAVKTARILRSRGLKVRILSFPCQRLFDEQSVGYRRSVLQRGKVPTVVIEAYVAYGWER
YATAGYTMNTFGKSLPVEDVYEYFGFNPSEISKKIEGYVRAVKANPDLLYEFIDLTEKPKHDQN
HL
-Exemplary Synthetic Formolase (Formolase) Nucleic Acid Coding
Sequence
SEQ ID NO: 201
ATGGCTATGATAACTGGTGGTGAACTTGTTGTGAGAACCCTGATTAAGGCCGGAGTAGAACACC
TGTTTGGGTTGCACGGAATCCATATCGACACAATTTTCCAGGCGTGTTTGGACCACGACGTTCC
TATCATTGACACAAGACACGAAGCCGCCGCGGGCCATGCTGCCGAAGGATATGCCAGAGCAGGT
GCTAAGTTAGGGGTCGCGCTGGTGACCGCAGGTGGTGGATTCACTAACGCGGTTACGCCAATTG
CCAACGCCAGGACAGACAGGACCCCAGTTTTGTTCTTGACCGGTAGCGGTGCTTTAAGAGACGA
CGAAACCAATACTCTTCAGGCAGGTATCGACCAGGTTGCAATGGCGGCCCCTATAACTAAGTGG
GCTCATAGAGTTATGGCGACCGAACATATACCGAGGCTCGTGATGCAGGCAATCAGGGCTGCTT
TATCCGCTCCTCGTGGACCTGTGCTGTTGGACCTTCCTTGGGATATCCTCATGAACCAAATAGA
CGAAGATTCAGTTATAATTCCTGACTTGGTCCTCTCCGCACACGGAGCACATCCCGATCCTGCG
GATCTTGACCAGGCGCTCGCACTCCTCAGGAAAGCCGAAAGACCAGTAATTGTGCTGGGCTCAG
AGGCCTCTCGAACAGCTCGTAAAACAGCATTATCAGCTTTCGTCGCCGCCACCGGAGTCCCAGT
GTTTGCAGACTACGAGGGACTAAGTATGCTATCTGGGCTGCCTGACGCTATGAGGGGTGGCCTT
GTCCAGAATTTATATAGCTTTGCCAAGGCTGACGCAGCACCCGATCTTGTTCTTATGTTGGGTG
CTCGTTTCGGTCTTAATACAGGTCACGGTTCAGGTCAATTGATTCCACATAGTGCTCAGGTCAT
ACAAGTCGACCCGGATGCTTGCGAGCTAGGCAGACTCCAAGGAATCGCTCTCGGAATAGTTGCC
GACGTTGGTGGGACAATAGAAGCGCTAGCACAAGCAACAGCACAAGACGCCGCCTGGCCAGATC
GTGGTGACTGGTGCGCAAAGGTGACTGACCTGGCCCAAGAACGTTATGCCAGCATCGCCGCGAA
GTCCTCATCAGAGCACGCTCTCCACCCATTCCATGCTTCGCAGGTGATAGCTAAACACGTTGAC
GCTGGTGTTACAGTCGTTGCGGACGGCGGACTAACTTACCTTTGGCTTTCAGAGGTAATGTCAA
GGGTAAAGCCAGGTGGATTCCTCTGCCACGGCTATCTTAACAGCATGGGTGTCGGTTTCGGAAC
TGCGCTCGGCGCCCAGGTAGCAGACCTCGAAGCGGGAAGAAGAACGATACTCGTTACTGGGGAC
GGATCAGTTGGCTACAGTATAGGTGAATTTGACACTCTCGTACGAAAACAATTGCCACTTATTG
TTATTATAATGAACAACCAATCTTGGGGCTGGACTTTGCACTTCCAGCAATTAGCAGTCGGACC
AAACAGGGTTACAGGTACTAGACTTGAGAATGGGTCCTACCATGGGGTGGCTGCAGCTTTTGGG
GCCGACGGATATCACGTGGACTCGGTTGAATCATTCAGCGCTGCTTTGGCACAGGCCCTGGCAC
ATAACAGGCCTGCATGCATTAACGTTGCAGTGGCTCTCGACCCAATTCCGCCTGAGGAGCTGAT
ACTCATTGGCATGGATCCTTTCGCCTGA
-Exemplary Synthetic Formolase (Formolase) Amino Acid Sequence
SEQ ID NO: 202
MAMITGGELVVRTLIKAGVEHLFGLHGIHIDTIFQACLDHDVPIIDTRHEAAAGHAAEGYARAG
AKLGVALVTAGGGFTNAVTPIANARTDRTPVLFLTGSGALRDDETNTLQAGIDQVAMAAPITKW
AHRVMATEHIPRLVMQAIRAALSAPRGPVLLDLPWDILMNQIDEDSVIIPDLVLSAHGAHPDPA
DLDQALALLRKAERPVIVLGSEASRTARKTALSAFVAATGVPVFADYEGLSMLSGLPDAMRGGL
VQNLYSFAKADAAPDLVLMLGARFGLNTGHGSGQLIPHSAQVIQVDPDACELGRLQGIALGIVA
DVGGTIEALAQATAQDAAWPDRGDWCAKVTDLAQERYASIAAKSSSEHALHPFHASQVIAKHVD
AGVTVVADGGLTYLWLSEVMSRVKPGGFLCHGYLNSMGVGFGTALGAQVADLEAGRRTILVTGD
GSVGYSIGEFDTLVRKQLPLIVIIMNNQSWGWTLHFQQLAVGPNRVTGTRLENGSYHGVAAAFG
ADGYHVDSVESFSAALAQALAHNRPACINVAVALDPIPPEELILIGMDPFA
-Exemplary Pseudomonas fluorescens Benzaldehyde lyase (BAL) Nucleic
Acid Coding Sequence
SEQ ID NO: 203
ATGGCGATGATTACAGGCGGCGAACTGGTTGTTCGCACCCTAATAAAGGCTGGGGTCGAACATC
TGTTCGGCCTGCACGGCGCGCATATCGATACGATTTTTCAAGCCTGTCTCGATCATGATGTGCC
GATCATCGACACCCGCCATGAGGCCGCCGCAGGGCATGCGGCCGAGGGCTATGCCCGCGCTGGC
GCCAAGCTGGGCGTGGCTGGTCACGGCGGGCGGGGGATTTACCAATGCGGTCACGCCCATTGCC
AACGCTTGGCTGGATCGCAAGGCCGGTGTATTCCTCACCCGGGATCGGGCGCGCTGCGTGATGA
TGAAACCAACACGTTGCAGGCGGGGATTGATCAGGTCGCCATGGCGGCGCCCATTACCAAATGG
GCGCATCGGGTGATGGCAACCGAGCATATCCCACGGCTGGTGATGCAGGCGATCCGCGCCGCGT
TGAGCGCGCCACGCGGGCCGGTGTTGCTGGATCTGCCGTGGGATATTCTGATGAACCAGATTGA
TGAGGATAGCGTCATTATCCCCGATCTGGTCTTGTCCGCGCATGGGGCCAGACCCGACCCTGCC
GATCTGGATCAGGCTCTCGCGCTTTTGCGCAAGGCGGAGCGGCCGGTCATCGTGCTCGGCTCAG
AAGCCTCGCGGACAGCGCGCAAGACGGCGCTTAGCGCCTTCGTGGCGGCGACTGGCGTGCCGGT
GTTTGCCGATTATGAAGGGCTAAGCATGCTCTCGGGGCTGCCCGATGCTATGCGGGGGGGGCTG
GTGCAAAACCTCTATTCTTTTGCCAAAGCCGATGCCGCGCCAGATCTCGTGCTGATGCTGGGGG
CGCGCTTTGGCCTTAACACCGGGCATGGATCTGGGCAGTTGATCCCCCATAGCGCGCAGGTCAT
TCAGGTCGACCCTGATGCCTGCGAGCTGGGACGCCTGCAGGGCATCGCTCTGGGCATTGTGGCC
GATGTGGGTGGGACCATCGAGGCTTTGGCGCAGGCCACCGCGCAAGATGCGGCTTGGCCGGATC
GCGGCGACTGGTGCGCCAAAGTGACGGATCTGGCGCAAGAGCGCTATGCCAGCATCGCTGCGAA
ATCGAGCAGCGAGCATGCGCTCCACCCCTTTCACGCCTCGCAGGTCATTGCCAAACACGTCGAT
GCAGGGGTGACGGTGGTAGCGGATGGTGCGCTGACCTATCTCTGGCTGTCCGAAGTGATGAGCC
GCGTGAAACCCGGCGGTTTTCTCTGCCACGGCTATCTAGGCTCGATGGGCGTGGGCTTCGGCAC
GGCGCTGGGCGCGCAAGTGGCCGATCTTGAAGCAGGCCGCCGCACGATCCTTGTGACCGGCGAT
GGCTCGGTGGGCTATAGCATCGGTGAATTTGATACGCTGGTGCGCAAACAATTGCCGCTGATCG
TCATCATCATGAACAACCAAAGCTGGGGGGCGACATTGCATTTCCAGCAATTGGCCGTCGGCCC
CAATCGCGTGACGGGCACCCGTTTGGAAAATGGCTCCTATCACGGGGTGGCCGCCGCCTTTGGC
GCGGATGGCTATCATGTCGACAGTGTGGAGAGCTTTTCTGCGGCTCTGGCCCAAGCGCTCGCCC
ATAATCGCCCCGCCTGCATCAATGTCGCGGTCGCGCTCGATCCGATCCCGCCCGAAGAACTCAT
TCTGATCGGCATGGACCCCTTCGCATGA
-Exemplary Pseudomonas fluorescens Benzaldehyde lyase (BAL) Amino
Acid Sequence
SEQ ID NO: 204
[sequence omitted]
-Exemplary Ogataea polymorpha Dihydroxyacetone synthase (DASOP)
Nucleic Acid Coding Sequence
SEQ ID NO: 205
ATGAGTATGAGAATCCCTAAAGCAGCGTCGGTCAACGACGAACAACACCAGAGAATCATCAAGT
ACGGTCGTGCTCTTGTCCTGGACATTGTCGAGCAGTACGGAGGAGGCCACCCGGGCTCGGCCAT
GGGCGCCATGGCTATCGGAATTGCTCTGTGGAAATACACCCTGAAATATGCTCCCAACGACCCT
AACTACTTCAACAGAGACAGGTTTGTCCTGTCGAACGGTCACGTGTGTCTGTTCCAGTATATCT
TCCAGCACCTGTACGGTCTCAAGTCGATGACCATGGCGCAGCTGAAGTCCTACCACTCGAATGA
CTTCCACTCGCTGTGTCCCGGTCACCCAGAAATCGAGCACGACGCCGTCGAGGTCACAACGGGC
CCGCTCGGCCAGGGTATCTCGAACTCTGTTGGTCTGGCCATAGCCACCAAAAACCTGGCTGCCA
CGTACAACAAGCCGGGCTTTGATATCATCACCAACAAGGTGTACTGCATGGTTGGCGATGCGTG
CTTGCAGGAGGGCCCTGCTCTCGAGTCGATCTCGCTGGCCGGCCACATGGGGCTGGACAATCTG
ATTGTGCTCTACGACAACAACCAGGTCTGCTGTGACGGCAGTGTTGACATTGCCAACACGGAGG
ACATCAGTGCCAAGTTCAAGGCCTGCAACTGGAACGTGATCGAGGTCGAGAACGCTTCCGAGGA
CGTGGCTACCATTGTCAAGGCCTTGGAGTACGCGCAGGCCGAGAAGCACAGACCAACACTTATC
AACTGCAGAACTGTGATTGGATCGGGTGCTGCGTTCGAGAACCACTGTGCTGCGCACGGTAACG
CTCTGGGCGAGGACGGTGTGCGCGAGCTCAAAATCAAGTACGGCATGAACCCGGCCCAGAAGTT
CTACATTCCGCAGGACGTGTACGACTTCTTCAAGGAGAAGCCGGCCGAGGGCGACAAGCTGGTG
GCCGAATGGAAGAGTCTCGTGGCCAAGTACGTCAAGGCGTACCCTGAGGAGGGCCAGGAGTTTT
TGGCGCGGATGAGAGGCGAGCTGCCAAAGAACTGGAAGTCGTTCCTGCCGCAGCAGGAATTCAC
CGGCGACGCTCCTACAAGGGCCGCTGCCAGAGAGCTTGTGAGAGCCCTGGGGCAGAACTGCAAG
TCGGTGATTGCCGGTTGCGCAGACCTGTCTGTGTCTGTCAATTTGCAGTGGCCAGGGGTGAAAT
ATTTCATGGACCCCTCGCTGTCCACGCAGTGTGGCCTGAGCGGCGACTACTCCGGCAGATACAT
TGAGTACGGAATCAGAGAACACGCCATGTGTGCTATCGCCAATGGCCTTGCCGCCTACAACAAG
GGCACGTTCCTGCCGATCACGTCGACTTTCTTCATGTTCTACCTGTACGCTGCCCCAGCCATCA
GAATGGCCGGCCTGCAGGAGCTCAAGGCGATCCACATCGGCACCCACGACTCGATCAATGAGGG
TGAGAACGGCCCTACGCACCAGCCGGTCGAGTCGCCAGCATTGTTCCGGGCCATGCCAAACATT
TACTACATGAGACCGGTCGACTCTGCAGAAGTGTTTGGCCTGTTCCAAAAAGCCGTCGAGCTGC
CATTCAGCTCGATTCTGTCGCTCTCGAGAAACGAGGTGCTGCAATACCCTGGCAAGTCGAGCGC
AGAGAAGGCGCAACGCGGCGGCTATATTCTGGAGGATGCGGAGAACGCCGAGGTGCAGATTATT
GGAGTTGGTGCAGAGATGGAGTTTGCATACAAGGCCGCCAAGATCTTGGGCAGAAAGTTCAGGA
CCAGAGTTCTCTCCATCCCATGCACGCGGCTGTTTGACGAGCAGTCGATCGGCTATAGACGCTC
GGTTTTGAGAAAGGACGGCAGACAGGTGCCAACGGTGGTGGTGGACGGCCACGTTGCGTTCGGC
TGGGAGAGATACGCTACGGCGTCCTACTGTATGAACACGTACGGCAAGTCTCTGCCTCCAGAAG
TGATCTACGAGTACTTTGGATACAACCCGGCAACGATTGCCAAGAAGGTCGAAGCGTACGTCCG
GGCGTGCCAAAGAGACCCTTTGCTGCTCCACGACTTCCTGGACCTGAAGGAAAAGCCTAACCAC
GATAAAGTAAATAAGCTCTGA
-Exemplary Ogataea polymorpha Dihydroxyacetone synthase (DASOP)
Amino Acid Sequence
SEQ ID NO: 206
MSMRIPKAASVNDEQHQRIIKYGRALVLDIVEQYGGGHPGSAMGAMAIGIALWKYTLKYAPNDP
NYFNRDRFVLSNGHVCLFQYIFQHLYGLKSMTMAQLKSYHSNDFHSLCPGHPEIEHDAVEVTTG
PLGQGISNSVGLAIATKNLAATYNKPGFDIITNKVYCMVGDACLQEGPALESISLAGHMGLDNL
IVLYDNNQVCCDGSVDIANTEDISAKFKACNWNVIEVENASEDVATIVKALEYAQAEKHRPTLI
NCRTVIGSGAAFENHCAAHGNALGEDGVRELKIKYGMNPAQKFYIPQDVYDFFKEKPAEGDKLV
AEWKSLVAKYVKAYPEEGQEFLARMRGELPKNWKSFLPQQEFTGDAPTRAAARELVRALGQNCK
SVIAGCADLSVSVNLQWPGVKYFMDPSLSTQCGLSGDYSGRYIEYGIREHAMCAIANGLAAYNK
GTFLPITSTFFMFYLYAAPAIRMAGLQELKAIHIGTHDSINEGENGPTHQPVESPALFRAMPNI
YYMRPVDSAEVFGLFQKAVELPFSSILSLSRNEVLQYPGKSSAEKAQRGGYILEDAENAEVQII
GVGAEMEFAYKAAKILGRKFRTRVLSIPCTRLFDEQSIGYRRSVLRKDGRQVPTVVVDGHVAFG
WERYATASYCMNTYGKSLPPEVIYEYFGYNPATIAKKVEAYVRACQRDPLLLHDFLDLKEKPNH
DKVNKL

### Dihydroxyacetone Kinase (DAK)

[0374] In certain embodiments, a composition described herein comprises at least one transgenic DAK and/or DAK-like enzyme. In certain embodiments, DAK and/or DAK-like proteins utilize dihydroxyacetone as a substrate and produce dihydroxyacetone-phosphate.

[0375] In some embodiments, a DAK and/or DAK-like gene and/or transgene comprises a sequence encoding a peptide sequence that is at least 90%, 91%, 92%, 93%, 94%, 95%, 96%, 97%, 98%, 99%, or 100% identical to any one of SEQ ID NOs: 208, 210, 212, or 214 (or a portion thereof). In some embodiments, a DAK and/or DAK-like gene and/or transgene comprises a nucleotide sequence that is at least 90%, 91%, 92%, 93%, 94%, 95%, 96%, 97%, 98%, 99%, or 100% identical to any one of SEQ ID NOs: 207, 209, 211, or 213 (or a portion thereof).

-Exemplary Saccharomyces cerevisiae S288C Dihydroxyacetone Kinase
(DAKY) Nucleic Acid Coding Sequence
SEQ ID NO: 207
ATGTCCCATAAGCAATTCAAGAGCGACGGTAACATCGTTACACCTTACCTTCTAGGATTAGCTA
GAAGTAACCCTGGCCTCACCGTGATCAAACACGACAGAGTCGTCTTTCGTACGGCAAGTGCTCC
CAATTCTGGTAATCCACCTAAAGTCAGTTTGGTTTCTGGTGGTGGGAGTGGCCATGAGCCGACT
CACGCCGGATTCGTTGGAGAAGGTGCTCTCGATGCTATTGCCGCTGGTGCAATATTCGCATCTC
CTAGTACAAAGCAAATCTACAGTGCCATCAAAGCCGTTGAATCTCCAAAAGGTACCCTTATTAT
AGTGAAGAATTATACGGGAGACATTATTCATTTTGGACTAGCAGCGGAAAGAGCTAAAGCGGCT
GGTATGAAGGTTGAACTTGTCGCAGTCGGGGACGACGTATCAGTTGGCAAGAAGAAGGGATCGC
TAGTCGGCCGACGTGGGCTGGGAGCGACGGTGCTTGTACACAAAATAGCTGGGGCTGCCGCGTC
TCACGGATTGGAGCTCGCTGAGGTCGCAGAAGTGGCCCAAAGTGTAGTTGATAACTCTGTAACC
ATCGCGGCGTCTCTGGACCATTGTACGGTACCTGGTCACAAACCAGAAGCTATCCTAGGTGAGA
ATGAGTACGAAATAGGAATGGGAATACATAACGAGAGTGGAACATATAAGTCCAGCCCACTTCC
AAGCATCTCCGAGCTAGTATCCCAAATGCTCCCATTGTTGTTAGATGAGGACGAGGACAGGAGC
TACGTGAAGTTTGAGCCCAAAGAGGATGTGGTCTTGATGGTTAACAACATGGGCGGCATGTCCA
ACCTCGAATTAGGGTATGCTGCCGAAGTCATTTCTGAGCAATTAATCGACAAATATCAGATAGT
CCCTAAGCGGACCATCACCGGGGCGTTCATTACAGCTCTCAATGGTCCCGGTTTTGGGATAACA
CTAATGAATGCATCCAAGGCTGGTGGTGATATACTCAAATATTTCGACTACCCCACTACAGCTA
GTGGATGGAACCAGATGTATCACTCGGCAAAAGACTGGGAAGTTCTTGCAAAGGGACAAGTACC
CACTGCTCCAAGTTTGAAAACATTAAGAAACGAGAAAGGATCAGGCGTGAAAGCTGACTATGAC
ACCTTCGCCAAAATTTTACTCGCTGGTATAGCAAAGATTAATGAAGTTGAGCCTAAGGTCACCT
GGTATGACACTATTGCAGGGGACGGTGACTGTGGCACCACGCTTGTTAGCGGTGGAGAAGCGTT
AGAGGAAGCTATCAAGAACCACACCTTAAGGCTTGAGGACGCAGCTTTGGGAATCGAAGATATA
GCCTACATGGTTGAGGACTCAATGGGCGGCACTTCAGGTGGGCTCTATTCCATTTATCTATCCG
CATTGGCTCAAGGTGTTAGAGACTCAGGCGACAAAGAGTTGACAGCGGAGACTTTCAAGAAGGC
TTCAAATGTAGCACTAGACGCTCTCTACAAATATACCAGAGCGCGACCAGGCTACCGTACGTTA
ATCGATGCCTTACAACCGTTCGTTGAAGCCCTTAAGGCTGGTAAAGGTCCTCGGGCTGCTGCAC
AAGCAGCATATGATGGGGCAGAAAAGACCAGGAAGATGGACGCGTTAGTCGGGCGTGCCTCTTA
TGTGGCTAAAGAGGAGTTGCGTAAGCTTGATAGTGAGGGTGGACTCCCAGATCCTGGAGCCGTG
GGACTTGCAGCACTTCTCGATGGATTTGTGACAGCGGCAGGCTATTAG
-Exemplary Saccharomyces cerevisiae S288C Dihydroxyacetone Kinase
(DAKY) Amino Acid Sequence
SEQ ID NO: 208
MSHKQFKSDGNIVTPYLLGLARSNPGLTVIKHDRVVFRTASAPNSGNPPKVSLVSGGGSGHEPT
HAGFVGEGALDAIAAGAIFASPSTKQIYSAIKAVESPKGTLIIVKNYTGDIIHFGLAAERAKAA
GMKVELVAVGDDVSVGKKKGSLVGRRGLGATVLVHKIAGAAASHGLELAEVAEVAQSVVDNSVT
IAASLDHCTVPGHKPEAILGENEYEIGMGIHNESGTYKSSPLPSISELVSQMLPLLLDEDEDRS
YVKFEPKEDVVLMVNNMGGMSNLELGYAAEVISEQLIDKYQIVPKRTITGAFITALNGPGFGIT
LMNASKAGGDILKYFDYPTTASGWNQMYHSAKDWEVLAKGQVPTAPSLKTLRNEKGSGVKADYD
TFAKILLAGIAKINEVEPKVTWYDTIAGDGDCGTTLVSGGEALEEAIKNHTLRLEDAALGIEDI
AYMVEDSMGGTSGGLYSIYLSALAQGVRDSGDKELTAETFKKASNVALDALYKYTRARPGYRTL
IDALQPFVEALKAGKGPRAAAQAAYDGAEKTRKMDALVGRASYVAKEELRKLDSEGGLPDPGAV
GLAALLDGFVTAAGY
-Exemplary Komagataella phaffii GS115 (Pischia pastoris)
Dihydroxyacetone Kinase (DAKP) Nucleic Acid Coding Sequence
SEQ ID NO: 209
ATGAGTTCAAAACATTGGGATTACAAGAAGGACCTTGTTCTTAGTCACCTGGCGGGTTTATGCC
AGTCCAACCCACATGTTAGGCTGATCGAATCCGAGAGGGTGGTAATCTCCGCTGAAAATCAGGA
AGATAAGATAACATTGATCAGTGGTGGTGGTTCAGGCCATGAGCCTTTACATGCCGGTTTCGTG
ACCAAGGACGGACTTTTAGACGCCGCTGTGGCGGGTTTCATTTTCGCCTCTCCCAGCACTAAGC
AGATATTCTCTGCAATCAAAGCGAAACCTTCTAAGAAAGGAACACTGATCATCGTGAAGAACTA
CACTGGGGACATATTGCATTTTGGCCTAGCAGCCGAGAAAGCGAAAGCTGAAGGGCTTAATGCG
GAACTCCTCATCGTCCAAGACGATGTGAGCGTTGGCAAGGCTAAGAACGGGCTTGTCGGTAGAA
GAGGTTTGGCTGGTACCTCACTGGTTCACAAGATTCTAGGGGCCAAAGCTTACTTACAAAAGGA
TAACTTGGAGTTGCACCAGCTAGTTACATTTGGTGAGAAAGTTGTCGCTAACCTCGTAACGATC
GGAGCGAGTCTTGACCATGTCACAATTCCAGCCCGAGCTAACAAGCAGGAAGAGGACGACTCTG
ACGATGAGCATGGGTACGAAGTACTAAAACACGACGAATTTGAGATTGGTATGGGTATACATAA
TGAGCCCGGTATTAAGAAATCATCACCCATACCCACCGTTGACGAACTTGTCGCGGAATTGCTC
GAATATCTACTTTCTACCACAGACAAAGATAGGAATTACGTTCAATTCGATAAGAACGATGAGG
TGGTGTTGCTTATCAACAACCTGGGCGGGACATCTGTGCTTGAGCTCTACGCTATCCAGAATAT
CGTTGTTGACCAATTGGCGTCCAAATACTCTATCAAGCCAGTGAGAATATTTACAGGCACCTTT
ACTACCTCTTTGGACGGACCAGGATTTTCAATTACGCTTTTGAACGCTACAAAGACAGGAGACA
AGGACATCTTGAAGTTTCTCGATCATAAAACGTCCGCACCTGGATGGAACTCTAACATCTCGGA
CTGGTCCGGTAGAGTAGACAATTTCATAGTAGCCGCGCCAGAAATCGATGAGGGAGATAGCTCT
AGTAAAGTTTCTGTGGATGCTAAGCTTTATGCGGACCTGCTTGAGTCCGGTGTGAAGAAAGTGA
TTTCAAAAGAACCCAAAATCACTCTCTACGATACCGTTGCTGGAGATGGTGACTGTGGAGAAAC
ATTGGCAAACGGGAGTAACGCTATACTAAAAGCTTTAGCTGAGGGGAAATTGGATCTCAAGGAC
GGGGTCAAGTCCCTTGTACAGATTACCGACATAGTGGAAACAGCGATGGGCGGGACTTCCGGTG
GCCTTTACTCAATTTTCATAAGTGCATTGGCAAAGAGCTTGAAAGAGAAGGAACTCTCTGAGGG
AGCCTACACCCTGACACTTGAGACTATATCAGGCTCTCTCCAGGCTGCTCTCCAGTCACTTTTC
AAATACACTAGAGCAAGAACAGGGGATCGAACGCTGATAGATGCCCTTGAGCCATTTGTAAAAG
AATTCGCAAAATCAAAAGATTTAAAACTGGCAAACAAAGCCGCTCACGACGGAGCAGAAGCGAC
CAGAAAACTTGAAGCGAAATTTGGTAGAGCTTCGTACGTGGCTGAGGAAGAATTCAAGCAATTT
GAGTCTGAGGGTGGACTCCCTGACCCAGGAGCAATTGGGCTGGCCGCTTTAATTTCCGGTATCA
CTGACGCCTATTTCAAGTCGGAAACGAAGCTCTAG
-Exemplary Komagataella phaffii GS115 (Pischia pastoris)
Dihydroxyacetone Kinase (DAKP) Amino Acid Sequence
SEQ ID NO: 210
MSSKHWDYKKDLVLSHLAGLCQSNPHVRLIESERVVISAENQEDKITLISGGGSGHEPLHAGFV
TKDGLLDAAVAGFIFASPSTKQIFSAIKAKPSKKGTLIIVKNYTGDILHFGLAAEKAKAEGLNA
ELLIVQDDVSVGKAKNGLVGRRGLAGTSLVHKILGAKAYLQKDNLELHQLVTFGEKVVANLVTI
GASLDHVTIPARANKQEEDDSDDEHGYEVLKHDEFEIGMGIHNEPGIKKSSPIPTVDELVAELL
EYLLSTTDKDRNYVQFDKNDEVVLLINNLGGTSVLELYAIQNIVVDQLASKYSIKPVRIFTGTF
TTSLDGPGFSITLLNATKTGDKDILKFLDHKTSAPGWNSNISDWSGRVDNFIVAAPEIDEGDSS
SKVSVDAKLYADLLESGVKKVISKEPKITLYDTVAGDGDCGETLANGSNAILKALAEGKLDLKD
GVKSLVQITDIVETAMGGTSGGLYSIFISALAKSLKEKELSEGAYTLTLETISGSLQAALQSLF
KYTRARTGDRTLIDALEPFVKEFAKSKDLKLANKAAHDGAEATRKLEAKFGRASYVAEEEFKQF
ESEGGLPDPGAIGLAALISGITDAYFKSETKL
-Exemplary Escherichia coli Dihydroxyacetone Kinase (DAKE) Nucleic
Acid Coding Sequence
SEQ ID NO: 211
ATGAAAAAATTGATCAATGATGTGCAAGACGTACTGGACGAACAACTGGCAGGACTGGCGAAAG
CGCATCCATCGCTGACACTGCATCAGGATCCGGTGTATGTCACCCGAGCTGATGCCCCTGTTGC
AGGAAAAGTCGCCCTGCTGTCGGGTGGCGGCAGCGGACACGAGCCGATGCACTGTGGGTATATC
GGTCAGGGGATGCTTTCGGGGGCCTGTCCGGGCGAAATTTTCACCTCACCGACGCCCGATAAAA
TCTTTGAATGCGCCATGCAAGTTGATGGCGGCGAAGGTGTACTGTTGATTATCAAAAATTACAC
CGGCGATATTCTTAACTTTGAAACAGCGACCGAGTTACTGCACGATAGCGGCGTAAAAGTGACC
ACTGTGGTCATTGATGACGACGTTGCGGTAAAAGACAGTCTTTATACTGCCGGGCGACGCGGCG
TTGCCAACACCGTATTAATTGAAAAACTCGTAGGCGCAGCGGCGGAGCGTGGCGACTCACTGGA
CGCCTGTGCGGAACTGGGGCGTAAGCTGAATAATCAAGGCCACTCAATAGGTATCGCTCTCGGT
GCCTGTACCGTTCCTGCCGCGGGCAAACCTTCTTTTACCCTGGCGGATAATGAGATGGAGTTTG
GCGTCGGCATTCATGGTGAGCCGGGTATTGACCGCCGCCCCTTCTCTTCCCTTGATCAAACCGT
CGATGAAATGTTCGACACCCTGCTGGTAAATGGCTCATACCATCGCACTTTGCGTTTCTGGGAT
TATCAACAAGGCAGTTGGCAGGAAGAACAACAAACCAAACAACCGCTCCAGTCTGGCGATCGGG
TGATTGCGCTGGTTAACAATCTTGGCGCAACTCCGCTTTCTGAGCTGTACGGCATCTATAACCG
CCTGACCACACGTTGCCAGCAAGCGGGATTGACTATCGAACGTAATTTAATTGGCGCGTACTGC
ACCTCACTGGATATGACCGGTTTCTCAATCACCTTACTGAAAGTTGATGACGAAACGCTGGCAC
TCTGGGACGCCCCGGTCCACACCCCGGCCCTTAACTGGGGTAAATAA
-Exemplary Escherichia coli Dihydroxyacetone Kinase (DAKE) Amino
Acid Sequence
SEQ ID NO: 212
MKKLINDVQDVLDEQLAGLAKAHPSLTLHQDPVYVTRADAPVAGKVALLSGGGSGHEPMHCGYI
GQGMLSGACPGEIFTSPTPDKIFECAMQVDGGEGVLLIIKNYTGDILNFETATELLHDSGVKVT
TVVIDDDVAVKDSLYTAGRRGVANTVLIEKLVGAAAERGDSLDACAELGRKLNNQGHSIGIALG
ACTVPAAGKPSFTLADNEMEFGVGIHGEPGIDRRPFSSLDQTVDEMFDTLLVNGSYHRTLRFWD
YQQGSWQEEQQTKQPLQSGDRVIALVNNLGATPLSELYGIYNRLTTRCQQAGLTIERNLIGAYC
TSLDMTGFSITLLKVDDETLALWDAPVHTPALNWGK
-Exemplary Citrobacter freundii Dihydroxyacetone Kinase (DHAKC)
Nucleic Acid Coding Sequence
SEQ ID NO: 213
ATGTCTCAATTCTTCTTCAATCAAAGAACACACCTTGTATCTGACGTTATTGACGGGACCATTA
TAGCATCACCTTGGAATAACTTGGCCAGGCTAGAGAGCGATCCAGCGATTAGGATAGTCGTGAG
ACGTGATTTGAATAAGAACAACGTTGCTGTTATCAGTGGAGGAGGGTCTGGACATGAGCCAGCT
CATGTAGGTTTCATAGGGAAAGGAATGCTAACTGCCGCTGTTTGCGGAGACGTGTTCGCTTCAC
CAAGTGTCGACGCCGTTCTAACGGCGATTCAGGCAGTCACAGGTGAGGCAGGATGTCTCCTAAT
TGTCAAGAATTACACCGGAGACAGACTTAATTTCGGTTTGGCTGCAGAGAAGGCTCGTAGACTG
GGCTATAACGTCGAGATGCTAATAGTGGGCGACGATATTTCATTACCAGATAACAAGCACCCTA
GAGGGATCGCGGGTACCATATTAGTTCACAAGATCGCAGGGTACTTCGCAGAAAGAGGATATAA
TCTAGCGACTGTTTTGCGAGAGGCACAGTACGCGGCTAACAATACTTTTAGTCTTGGGGTAGCG
TTGTCCTCATGTCATCTCCCTCAAGAGGCGGACGCCGCGCCTAGGCATCACCCAGGACACGCAG
AACTTGGCATGGGCATACACGGCGAGCCGGGAGCGTCTGTTATCGATACGCAAAATTCAGCTCA
GGTTGTTAATCTGATGGTTGACAAACTCATGGCTGCGTTACCGGAAACAGGGCGACTCGCAGTC
ATGATAAATAACCTGGGTGGTGTGAGCGTAGCTGAAATGGCGATCATCACACGGGAGCTGGCTT
CTTCACCTCTTCACCCAAGGATCGACTGGCTCATAGGGCCAGCAAGCTTGGTTACCGCATTAGA
TATGAAATCTTTCAGCTTAACAGCAATCGTACTAGAGGAAAGCATTGAGAAAGCACTTCTCACA
GAGGTGGAGACATCAAATTGGCCAACGCCGGTGCCCCCTAGAGAAATTTCGTGCGTGCCTTCAA
GTCAGCGGAGTGCTCGTGTTGAATTTCAGCCCTCAGCGAACGCTATGGTTGCAGGGATTGTAGA
ACTGGTGACTACAACTTTATCGGACCTCGAAACACACTTAAATGCCTTGGACGCCAAAGTTGGA
GACGGCGATACGGGATCAACCTTCGCTGCAGGGGCGCGGGAAATAGCAAGTCTCTTGCACCGAC
AACAGCTCCCGTTAGATAATTTGGCTACACTCTTCGCATTGATCGGAGAACGTCTCACAGTAGT
AATGGGTGGTTCCAGTGGGGTTTTAATGTCGATCTTCTTCACTGCTGCAGGTCAAAAGCTCGAA
CAAGGAGCATCGGTGGCTGAAAGTCTGAACACCGGATTAGCACAGATGAAATTCTACGGTGGAG
CCGATGAGGGTGATCGTACTATGATCGATGCGCTGCAGCCCGCATTAACTTCGCTCTTAACGCA
GCCACAAAATCTTCAGGCAGCTTTCGACGCTGCCCAAGCAGGGGCGGAACGTACCTGTTTGAGC
TCTAAGGCTAATGCGGGACGTGCGTCATATCTTTCATCGGAGAGTCTCCTTGGTAACATGGACC
CCGGAGCACACGCAGTAGCTATGGTGTTTAAGGCCTTAGCGGAGTCTGAGCTCGGATAG
-Exemplary Citrobacter freundii Dihydroxyacetone Kinase (DHAKC)
Amino Acid Sequence
SEQ ID NO: 214
MSQFFFNQRTHLVSDVIDGTIIASPWNNLARLESDPAIRIVVRRDLNKNNVAVISGGGSGHEPA
HVGFIGKGMLTAAVCGDVFASPSVDAVLTAIQAVTGEAGCLLIVKNYTGDRLNFGLAAEKARRL
GYNVEMLIVGDDISLPDNKHPRGIAGTILVHKIAGYFAERGYNLATVLREAQYAANNTFSLGVA
LSSCHLPQEADAAPRHHPGHAELGMGIHGEPGASVIDTQNSAQVVNLMVDKLMAALPETGRLAV
MINNLGGVSVAEMAIITRELASSPLHPRIDWLIGPASLVTALDMKSFSLTAIVLEESIEKALLT
EVETSNWPTPVPPREISCVPSSQRSARVEFQPSANAMVAGIVELVTTTLSDLETHLNALDAKVG
DGDTGSTFAAGAREIASLLHRQQLPLDNLATLFALIGERLTVVMGGSSGVLMSIFFTAAGQKLE
QGASVAESLNTGLAQMKFYGGADEGDRTMIDALQPALTSLLTQPQNLQAAFDAAQAGAERTCLS
SKANAGRASYLSSESLLGNMDPGAHAVAMVFKALAESELG

### E) Formate Pathway

[0376] In some embodiments, compositions and methods described herein comprise introduction of one or more genes coding for HCHO metabolism into CO₂ through a formate intermediate, which is then taken up by various endogenous pathways, for example the Calvin Benson cycle. In some embodiments, these enzymes metabolize the substrate formate to produce CO₂, a component that can be incorporated into the Calvin-Benson cycle, a photosynthetic carbon fixation pathway, or other endogenous plant pathways. In some embodiments, genes are introduced that comprise coding sequences for formaldehyde dehydrogenase (FALDH) and/or formate dehydrogenase (FDH). In certain embodiments, Serine hydroxymethyltransferase 1, mitochondrial (SHM1) and/or(S)-2-hydroxy-acid oxidase (GLO1 and/or GLO2) may also impact the metabolic flux of HCHO metabolism as described herein, for example, through the production of L-Serine and/or oxocarboxylate. In some embodiments, genes are introduced that comprise coding sequences for SHM1, GLO1, and/or GLO2.

### Formaldehyde Dehydrogenase (FALDH)

[0377] In certain embodiments, a composition described herein comprises at least one transgenic FALDH enzyme. In some embodiments, FALDH enzymes utilize the substrate formaldehyde, and create the product formate.

[0378] In some embodiments, a FALDH gene and/or transgene comprises a sequence encoding a peptide sequence that is at least 90%, 91%, 92%, 93%, 94%, 95%, 96%, 97%, 98%, 99%, or 100% identical to any one of SEQ ID NOs: 216, 218, or 220 (or a portion thereof). In some embodiments, a FALDH gene and/or transgene comprises a nucleotide sequence that is at least 90%, 91%, 92%, 93%, 94%, 95%, 96%, 97%, 98%, 99%, or 100% identical to any one of SEQ ID NOs: 215, 217, or 219 (or a portion thereof).

-Exemplary Methylobacterium sp. XJLW Formaldehyde dehydrogenase,
glutathione-independent (FALDH9) Nucleic Acid Coding Sequence
SEQ ID NO: 215
ATGGCCGCTAACGGAAACAGGGTCGTTACTTTTCAGGGTCCTATGAAAATGGAACTAAAGACTT
TCGATTTTCCTAAATTGGTCACACCAACTGGGAAGAAAGCAAATCACGGGGCTATTTTGAAAAT
AGTGACCACCAACATTTGCGGATCTGACCAGCACATTTATCACGGTCGGTTCGCCGCACCAAAA
GGGATGGTTATGGGACACGAAATGACGGGCGAAGTTATTGAGGTCGGGTCTGATGTTGAGTTTA
TTAGAGTGGGTGACTTATGCAGTGTACCGTTTAATGTATCCTGCGGGCGGTGCAGGAACTGCAA
AGAAAGGCACACTGATGTATGTATGAATGTTAATGATGAGGTAGACTGCGGCGCGTATGGATTC
AATCTCGGTGGATGGCAAGGTGGGCAGTCCGACTACCTCATGGTACCTTACGCGGATTGGAACC
TTCTCTCGTTCCCGGACAAGGACCAAGCAATGGAGAAGATTAGAGATCTGACATTGTTGTCTGA
CATACTTCCTACCGGTTTCCACGGTCTTATGGCCGCAGGCGCTAAAGCTGGATCGACTGTGTAT
ATCGCTGGAGCTGGGCCTGTCGGCAGGTGCGCAGCTGCTGGGGCAAGATTGATTGGGGCGTCCT
GTATCATCGTTGCCGACACGAACCGAGCTAGGTTGGACTTGGTTAAGAACAATGGTTGCGAGGT
GGTCGACCTCACGAAGGGTACACCTGTACCTGACCAAATAGAGGCGATCCTCGGTAAGAGAGAA
GTTGATTGTGGTGTGGATTGTGTTGGCCTCGAAGCACATGGTAATGGACCTGAGGCTAACAAGG
AGCATTCAGAAGCTGTTATAAACACGCTTTTCCAAGTCGTGAGAGCAGGTGGGGCGATGGGAGT
TCCTGGAATCTATACAGCTGCGGACCCGAAGGCATCTTCAGAATTGACAAAGAAAGGACAGTTG
CCTATAGACTTTGGAAAGGCATGGATTAAGTCTCCAAAGTTGACAGCAGGTCAGGCCCCTATAA
TGCACTATAATCGGGATCTGATGATGGCTATATTGTGGGACAGGATGCCATACCTGGGAGCAAT
GCTCAACACAGAAGTAATTACTTTAGAGCAAGCACCAGCCGCTTATAAGACGTTCTCAGACGGT
AGTCCTAAGAAGTTTGTTATCGACCCCCACGGGTCCGTTAAGAAGGCATCGTAG
-Exemplary Methylobacterium sp. XJLW Formaldehyde dehydrogenase,
glutathione-independent (FALDH9) Amino Acid Sequence
SEQ ID NO: 216
MAANGNRVVTFQGPMKMELKTFDFPKLVTPTGKKANHGAILKIVTTNICGSDQHIYHGRFAAPK
GMVMGHEMTGEVIEVGSDVEFIRVGDLCSVPFNVSCGRCRNCKERHTDVCMNVNDEVDCGAYGF
NLGGWQGGQSDYLMVPYADWNLLSFPDKDQAMEKIRDLTLLSDILPTGFHGLMAAGAKAGSTVY
IAGAGPVGRCAAAGARLIGASCIIVADTNRARLDLVKNNGCEVVDLTKGTPVPDQIEAILGKRE
VDCGVDCVGLEAHGNGPEANKEHSEAVINTLFQVVRAGGAMGVPGIYTAADPKASSELTKKGQL
PIDFGKAWIKSPKLTAGQAPIMHYNRDLMMAILWDRMPYLGAMLNTEVITLEQAPAAYKTFSDG
SPKKFVIDPHGSVKKAS
-Exemplary Pseudomonas sp. 101 Formaldehyde dehydrogenase
(FALDHP) Nucleic Acid Coding Sequence
SEQ ID NO: 217
ATGAGTGGTAACCGAGGCGTAGTGTACTTGGGTTCAGGAAAGGTAGAAGTCCAGAAGATTGATT
ATCCAAAGATGCAGGACCCTAGGGGTAAGAAAATCGAGCACGGCGTAATACTGAAAGTAGTGTC
CACCAACATTTGCGGTTCTGACCAGCATATGGTAAGAGGGCGAACTACAGCGCAGGTAGGTTTG
GTTCTCGGGCACGAAATAACTGGTGAGGTTATAGAGAAAGGTAGAGATGTTGAAAATCTGCAGA
TAGGAGATCTTGTCTCGGTGCCATTCAACGTGGCTTGTGGGCGGTGCAGGAGTTGCAAGGAAAT
GCACACAGGGGTCTGCCTTACTGTTAATCCAGCGCGAGCTGGCGGGGCGTATGGTTACGTTGAC
ATGGGTGACTGGACTGGTGGACAAGCAGAATACCTTCTCGTCCCATACGCGGACTTCAACTTAC
TCAAATTGCCGGACCGTGACAAGGCTATGGAAAAGATAAGGGACCTCACCTGCCTATCAGACAT
ACTGCCGACAGGATATCATGGTGCAGTCACTGCTGGAGTAGGTCCAGGCTCGACAGTTTACGTT
GCGGGTGCAGGACCGGTGGGTCTTGCTGCTGCAGCGTCGGCGAGACTGTTGGGAGCAGCAGTTG
TTATAGTTGGCGATTTGAACCCGGCCAGACTCGCGCATGCTAAAGCGCAAGGTTTTGAAATAGC
GGACCTCTCATTGGACACCCCGTTACATGAGCAGATTGCAGCACTCCTGGGTGAACCAGAAGTT
GATTGCGCGGTCGATGCTGTTGGATTCGAAGCTAGAGGACACGGTCACGAAGGAGCAAAACATG
AGGCACCCGCTACAGTACTAAATAGTCTAATGCAAGTTACCAGAGTTGCGGGGAAGATAGGTAT
CCCAGGATTATACGTGACTGAAGATCCAGGTGCAGTGGACGCAGCAGCCAAGATCGGTTCTCTA
AGTATCCGATTTGGTTTGGGATGGGCCAAATCGCATTCTTTTCACACGGGGCAAACCCCTGTAA
TGAAGTATAATCGGGCCTTGATGCAAGCTATTATGTGGGATCGTATAAACATCGCTGAGGTCGT
AGGAGTCCAAGTAATCAGTCTTGACGACGCTCCACGAGGGTATGGAGAGTTCGACGCTGGGGTG
CCTAAGAAATTTGTTATCGACCCTCACAAAACATTTTCGGCAGCTTAG
-Exemplary Pseudomonas sp. 101 Formaldehyde dehydrogenase
(FALDHP) Amino Acid Sequence
SEQ ID NO: 218
MSGNRGVVYLGSGKVEVQKIDYPKMQDPRGKKIEHGVILKVVSTNICGSDQHMVRGRITAQVGL
VLGHEITGEVIEKGRDVENLQIGDLVSVPFNVACGRCRSCKEMHTGVCLTVNPARAGGAYGYVD
MGDWTGGQAEYVLVPYADFNLLKLPDRDKAMEKIRDLTCLSDILPTGYHGAVTAGVGPGSTVYV
AGAGPVGLAAAASARLLGAAVVIVGDLNPARLAHAKAQGFEIADLSLDTPLHEQIAALLGEPEV
DCAVDAVGFEARGHGHEGAKHEAPATVLNSLMQVTRVAGKIGIPGLYVTEDPGAVDAAAKIGSL
SIRFGLGWAKSHSFHTGQTPVMKYNRALMQAIMWDRINIAEVVGVQVISLDDAPRGYGEFDAGV
PKKFVIDPHKTFSAA
-Exemplary Epipremnum Aureum Formaldehyde dehydrogenase
(FALDHEa) Nucleic Acid Coding Sequence
SEQ ID NO: 219
ATGGCTACTAAGCGCAAGTCATAACATGTAAAGCCGCTGTTGCGTGGGAAGCCAATAAACCCCT
AGCGATCGAGGATGTCCTCGTTGCACCACCTCAAGCCGGAGAAGTCCGCATTAAAATCCTTTTT
ACCGCTTTGTGTCATACCGATGCGTATACGTGGAGCGGGAAGGATCCTGAAGGGCTGTTTCCAT
GTATTTTGGGACATGAAGCCGCAGGGATAGTGGAATCGGTCGGAGAGGGAGTCACCGAAGTTCA
ACCAGGTGACCATGTAATCCCATGCTATCAGGCTGAATGTAGGGAGTGCAAATTTTGCAAATCA
GGTAAGACTAATTTATGTGGTAAAGTTCGTGCAGCTACGGGCGTTGGAATTATGATGAATGATA
GAAAGAGCAGATTTTCTATAAATGGTAAACCAATTTATCACTTTATGGGGACGAGTACGTTTTC
ACAATATACCGTAGTTCATGATGTTTCTGTTGCCAAAATTGATCCCAAAGCACCACTCGAGAAG
GTTTGTCTACTTGGGTGTGGTGTTGCAACAGGGTTGGGAGCAGTATGGAACACAGCCAAAGTCG
AGGCTGGCTCCATCGTAGCCATATTTGGTCTTGGAACTGTAGGTTTGGCCGTAGCTGAAGGAGC
AAAAACCGCAGGAGCGAGCCGAATAATTGGAATAGATATTGACAGCAAGAAATTCGACGTAGCC
AAAAATTTTGGAGTTACAGAGTTTGTTAACCCAAAAGATTATGAGAAACCGATCCAGCAAGTTT
TGGTAGACCTCACTGACGGAGGCGTGGACTATTCCTTTGAATGCATAGGAAACGTATCAGTTAT
GCGAGCCGCATTAGAATGCTGTCACAAGGGGTGGGGGACGAGCGTTATCGTCGGGGTTGCTGCA
TCAGGGCAAGAGATTTCCACTAGACCATTTCAGTTGGTCACCGGCCGAGTGTGGAAAGGTACAG
CATTTGGAGGGTTTAAGTCCCGCAGCCAGGTCCCCTGGCTGGTAGATAAGTATATGAAGAAAGA
GATCAAAGTGGATGAGTACATTACACATAATCTGACATTGGGAGAAATAAACAAAGGTTTCGAC
TTTATGCATGAAGGGAGCTGTCTCAGATGTGTGTTAGATACTCAAGTATAA
-Exemplary Epipremnum Aureum Formaldehyde dehydrogenase
(FALDHEa)Amino Acid Sequence
SEQ ID NO: 220
MATEAQVITCKAAVAWEANKPLAIEDVLVAPPQAGEVRIKILFTALCHTDAYTWSGKDPEGLFP
CILGHEAAGIVESVGEGVTEVQPGDHVIPCYQAECRECKFCKSGKTNLCGKVRAATGVGIMMND
RKSRFSINGKPIYHFMGTSTFSQYTVVHDVSVAKIDPKAPLEKVCLLGCGVATGLGAVWNTAKV
EAGSIVAIFGLGTVGLAVAEGAKTAGASRIIGIDIDSKKFDVAKNFGVTEFVNPKDYEKPIQQV
LVDLTDGGVDYSFECIGNVSVMRAALECCHKGWGTSVIVGVAASGQEISTRPFQLVTGRVWKGT
AFGGFKSRSQVPWLVDKYMKKEIKVDEYITHNLTLGEINKGFDFMHEGSCLRCVLDTQV

### Glutathione-Dependent Formaldehyde Dehydrogenase (GD-FALDH)

[0379] In certain embodiments, a composition described herein comprises at least one transgenic GD-FALDH enzyme. In some embodiments, GD-FALDH enzymes utilize the substrate formaldehyde, and create the product formate.

[0380] In some embodiments, a GD-FALDH gene and/or transgene comprises a sequence encoding a peptide sequence that is at least 90%, 91%, 92%, 93%, 94%, 95%, 96%, 97%, 98%, 99%, or 100% identical to any one of SEQ ID NOs: 222 or 224 (or a portion thereof). In some embodiments, a GD-FALDH gene and/or transgene comprises a nucleotide sequence that is at least 90%, 91%, 92%, 93%, 94%, 95%, 96%, 97%, 98%, 99%, or 100% identical to any one of SEQ ID NOs: 221 or 223 (or a portion thereof).

-Exemplary Methylobacterium sp. XJLW Formaldehyde dehydrogenase
(GD-FALDH10) Nucleic Acid Coding Sequence
SEQ ID NO: 221
ATGAAGGCACTGTGCTGGCACGGCCGCAACGATATCCGCTGCGACACGGTCCCGGACCCGGTCA
TCGAGGATTCCCGCGACGTGATCATCAAGGTCACGAGCTGCGCGATCTGCGGCTCGGACCTACA
TCTGATGGACGGCCAGATGCCGACCATGAAGAGCGGCGACGTCCTCGGCCACGAATTCATGGGC
GAGATCGTGGAGGTCGGGACCGGCTTCACCAAGTTCAAAAAGGGCGATCGGATCGTCGTGCCCT
TCAACATCAACTGCGGCGCATGCCGCCAGTGCAAGCTCGGCAATTACTCGGTCTGCGAGCGCTC
AAACCGCAACGCCGAGATGGCGGCCGCGCAGTTCGGCTACACGACGGCCGGCCTGTTCGGATAC
TCGCACCTGACCGGCGGCTATGCCGGTGGCCAGGCCGAGTATGTCCGTGTGCCGATGGCCGACG
TCGCGCCAATGAAGGTGCCGGAAGGCATGGACGACGAATCCGTCCTGTTCCTCACCGACATCCT
GCCCACCGGCTGGCAGGGCGCGGAGCATTGCGAGATCCAGGGCGGCGAGACGATTGCGGTCTGG
GGCGCCGGCCCGGTCGGCATCTTCGCGATCCAATCGGCGAAGATCATGGGGGCCGAGCGGATCA
TCGCCATCGAGACCGTGCCCGAGCGCATCGCCCTCGCCCGGAAGGCCGGCGCCACCGACATCAT
CGACTTCATGAACGAGGACGTGTTCGAGCGAATCAAGGAGATCACCAAGGGCCAGGGTGCCGAC
GGCGTGATCGACTGCGTCGGCATGGAGGCGAGTGCCGGCCATGGCGGCCTCACTGGCGTGCTCT
CCGCCGTCCAGGAGAAGCTGACCGCCACCGAGCGGCCCTACGCGCTGGCCGAAGCCATCAAGGC
GGTCCGGCCCTGTGGGATCGTCTCGGTGCCCGGCGTCTATGGCGGACCGATCCCGGTCAACATG
GGCTCGATCGTCCAGAAGGGCCTGACCCTCAAGAGCGGCCAGACCCATGTGAAGCGCTATCTCG
AGCCGCTGACCAAGCTGATCCAAGAGGGCAAGATCGACATGACCTCCCTGATCACCCACCGCTC
GCACGACCTCGCGGATGGGCCGGACCTCTACAAGGCCTTCCGCGACAAGAAGGACGGCTGCGTG
AAGGTGGTGTTTCACCTGAACTGA
-Exemplary Methylobacterium sp. XJLW Formaldehyde dehydrogenase
(GD-FALDH10) Amino Acid Sequence
SEQ ID NO: 222
MKALCWHGRNDIRCDTVPDPVIEDSRDVIIKVTSCAICGSDLHLMDGQMPTMKSGDVLGHEFMG
EIVEVGTGFTKFKKGDRIVVPFNINCGACRQCKLGNYSVCERSNRNAEMAAAQFGYTTAGLFGY
SHLTGGYAGGQAEYVRVPMADVAPMKVPEGMDDESVLFLTDILPTGWQGAEHCEIQGGETIAVW
GAGPVGIFAIQSAKIMGAERIIAIETVPERIALARKAGATDIIDEMNEDVFERIKEITKGQGAD
GVIDCVGMEASAGHGGLTGVLSAVQEKLTATERPYALAEAIKAVRPCGIVSVPGVYGGPIPVNM
GSIVQKGLTLKSGQTHVKRYLEPLTKLIQEGKIDMTSLITHRSHDLADGPDLYKAFRDKKDGCV
KVVFHLN
-Exemplary Methylobacterium sp. XJLW Formaldehyde dehydrogenase
(GD-FALDH11) Nucleic Acid Coding Sequence
SEQ ID NO: 223
ATGAAAGCTCTTACTTGGCAAAGTCGAGGGAAAATTACTTGTGAAACAGTCCCTGACCCTAAAA
TCGAGCACGGGCGAGATGTGATCATTAAAGTAACGGCTTGTGCTATCTGTGGTAGTGATCTACA
CCTCATGGGTGGGTTTATGCCGACTATGAAATGCGGAGATATCCTTGGACATGAGACAATGGGA
GAGGTCATAGAGGTTGGTAAGGACAACCATAAGCTTAAAGTTGGTGACCGTATAGTCGTTCCGT
TCACAATCTGTTGCGGAGAATGCCGGCAATGCAAATGGGGTAACTGGAGCTGCTGCGAACGGAC
TAACCCTAACGGCAAACTGCAAGCTGAGACATACGGTTATCCTCTCGCCGGGTTGTTCGGATTT
TCACACATCACAGGCGGTTTCGCTGGCGGGCAAGCAGAGTATTTAAGAGTGCCTTATGCAGATG
TGGGGCCCATTGTCGTACCAGAAGGACTCACGGACGAGCAAGTCCTGTTTCTTTCAGACATATT
TCCTACTGCTTACCAGGCCGCAGAGCATTGCGACATCGGGCCAGAGGATACAGTCGCCATTTGG
GGTTGCGGTCCAGTAGGGGTGCTCGCTGTGAAGTGTTGCTATCTACTTGGAGCAAAGAGAGTTA
TTGCAATTGATTCAGTGCCGGAGAGGCTTGCGCTCGCACGAGAAGCTGGTGCTGAGACAATCGA
TCTTTCATCTCAAAATGTCCAGGACACCCTCATGGAGATGACACACGGACTTGGTCCTGACTCC
GTCATCGAGGCAGTCGGGATGGAAAGCCACGGTGCTGACACAACACTTCAAAAGGTATCTTCTG
CTATCATGGAGCACACTGTTTCGTTAGAAAGGCCATTTGCGCTCAACCAAGCTATCCTCGCCTG
CAGGCCTGGCGGTAATGTCTCTATGCCAGGGGTTTTCGCGGGTCCTGTGGGACCAGTCGCACTA
GGAGTGCTGATGAATAAGGGACTCACTCTTAAAACCGGCCAGACACATATGGTGCGGTATATGA
AGCCTCTATTAGAGAGGATTCAGAAGGGTGAGATAGACCCATCATTTATCGTGTCCCATCGATC
GACAAACTTGGAAGAAGGTCCCGCACTTTACGAGGCCTTTCGAGATAAAACCGACAATTGCACC
AAAGTGGTGTTTAAACCCCATTAG
-Exemplary Methylobacterium sp. XJLW Formaldehyde dehydrogenase
(GD-FALDH11) Amino Acid Sequence
SEQ ID NO: 224
MKALTWQSRGKITCETVPDPKIEHGRDVIIKVTACAICGSDLHLMGGFMPTMKCGDILGHETMG
EVIEVGKDNHKLKVGDRIVVPFTICCGECRQCKWGNWSCCERINPNGKLQAETYGYPLAGLFGF
SHITGGFAGGQAEYLRVPYADVGPIVVPEGLTDEQVLFLSDIFPTAYQAAEHCDIGPEDTVAIW
GCGPVGVLAVKCCYLLGAKRVIAIDSVPERLALAREAGAETIDLSSQNVQDTLMEMTHGLGPDS
VIEAVGMESHGADTTLQKVSSAIMEHTVSLERPFALNQAILACRPGGNVSMPGVFAGPVGPVAL
GVLMNKGLTLKTGQTHMVRYMKPLLERIQKGEIDPSFIVSHRSTNLEEGPALYEAFRDKIDNCT
KVVFKPHG

### Formate Dehydrogenase (FDH)

[0381] In certain embodiments, a composition described herein comprises at least one transgenic FDH enzyme. In some embodiments, FDH enzymes utilize the substrate formate, and create the product CO2.

[0382] In some embodiments, a FDH gene and/or transgene comprises a sequence encoding a peptide sequence that is at least 90%, 91%, 92%, 93%, 94%, 95%, 96%, 97%, 98%, 99%, or 100% identical to any one of SEQ ID NOs: 226, 227, 228, 229, 231, 233, 234, 236, 238, or 240 (or a portion thereof). In some embodiments, a FDH gene and/or transgene comprises a nucleotide sequence that is at least 90%, 91%, 92%, 93%, 94%, 95%, 96%, 97%, 98%, 99%, or 100% identical to any one of SEQ ID NOs: 225, 230, 232, 235, 237, or 239 (or a portion thereof).

-Exemplary Methylobacterium sp. XJLW Formate Dehydrogenase
(FDH3) Nucleic Acid Coding Sequence
SEQ ID NO: 225
ATGAGCGTGACTCTCTATATTCCTCGGGATGCAGTGGCCTTGGGTCTTGGTGCGAACAAGGTAG
CTAGAGCGTTGTTCGCAGGAGCTGAACGTCGGGGTCTAGATGTAACCATCGTGCGAACAGGAAG
TCGAGGACTTTTCTGGTTAGAGCCAATGGTTGAGGTGGGAACACCAGAGGGAAGAGTAGCGTAT
GGACCCGTAAAGCTGGCAGACATAGACGCTCTTCTTGATGCTGGGCTCGCAACCGGCGGAGATC
ATCCACTACGATTAGGTGACCCTGAAAAGATCCCTTACTTAGCTCGGCAACAACGGTTAACCTT
TCACAGGTGCGGTGTTATTGATCCTGTTAGTGTGGACGATTATCGTGCCCATGGTGGTTATCGA
GGCCTAGAAGCAGCTCTCAAACTCGATGCTGAAGGTATCGTAGCGGCAGTAAGGGACTCCGGAC
TCCGTGGACGGGGTGGTGCAGGCTTCCCAGCCGGAATTAAATGGAATACGGTTATGCTAGCTAA
AGCTGACCAGAAGTATGTAGTTTGTAACGCAGACGAGGGTGACTCAGGTACTTTTGCAGACAGA
ATGATGATGGAAGGAGATCCCTTTAATCTAATCGAAGGCATGACCATCGCAGCCGTCGCTACTG
GAGCAACCAGAGGATACATATACCTTAGGTCGGAATATCCACAGGCCTTTGCAACACTGAAGGA
AGCTATCGCGAACGGAGTGACTGCAGGAGTCCTCGGTGAGAATATATTAGGATCAGGGAAAACT
TTTCACTTAGAGGTGAGATTAGGAGCCGGTGCGTACATTTGCGGTGAAGAGACGTCACTACTTG
AGTCTCTAGAGGGTAAGAGAGGAATCGTCCGTGCTAAACCACCTATTCCAGCTCTCAAAGGATT
CTTAGGTAAACCGACGTTGGTAAATAACGTAATGACCTTTACAGCAGTTCCTTGGATATTGGAG
AATGGAGCAAAGGCGTATGCGGATTACGGCATGGGACGTAGTTTGGGCACCTTGCCGATTCAAC
TCGCAGGTAACATCAAACACGGTGGTTTGATCGAAATGGCCTTTGGAATCACTTTGCGTCAGGT
CATCGAGGACTTTGGAGGAGGTACACGGTCTGGTCGTCCAGTGCGTGCCGTGCAAGTAGGTGGT
CCACTGGGCGCCTATTTTCCAGATCACCTCTTAGACACCCCGCTCGACTACGAGGCAATGGCAG
CAAAGAAAGGCCTGGTTGGACACGGTGGCATCGTTGTCTTTGATGACACGGTTGACATGGCAGC
GCAAGCGCGATTTGCCTTTGAGTTCTGCGCTACCGAATCTTGTGGAAAATGCACACCGTGCAGA
ATCGGTGCGACACGAGGGGTCGAAACAATGGATAAGGTGATAGCAGGAATCCGACCAGACGCGA
ACCTCAAACTCGTTGAGGATTTGTGCGAGGTAATGACAGATGGTTCTCTGTGTGCTATGGGTGG
GCTCACGCCTATGCCAGTTATGAGCGCAATCACCCACTTTCCGGAAGATTTCCGTCGAGCCGGA
GACTTGCCGGCTGCAGCCGAGTAA
-Exemplary Methylobacterium sp. XJLW Formate Dehydrogenase
(FDH3) Amino Acid Sequence
SEQ ID NO: 226
MSVTLYIPRDAVALGLGANKVARALFAGAERRGLDVTIVRTGSRGLFWLEPMVEVGTPEGRVAY
GPVKLADIDALLDAGLATGGDHPLRLGDPEKIPYLARQQRLTFHRCGVIDPVSVDDYRAHGGYR
GLEAALKLDAEGIVAAVRDSGLRGRGGAGFPAGIKWNTVMLAKADQKYVVCNADEGDSGTFADR
MMMEGDPFNLIEGMTIAAVATGATRGYIYLRSEYPQAFATLKEAIANGVTAGVLGENILGSGKT
FHLEVRLGAGAYICGEETSLLESLEGKRGIVRAKPPIPALKGFLGKPTLVNNVMTFTAVPWILE
NGAKAYADYGMGRSLGTLPIQLAGNIKHGGLIEMAFGITLRQVIEDFGGGTRSGRPVRAVQVGG
PLGAYFPDHLLDTPLDYEAMAAKKGLVGHGGIVVFDDTVDMAAQARFAFEFCATESCGKCTPCR
IGATRGVETMDKVIAGIRPDANLKLVEDLCEVMTDGSLCAMGGLTPMPVMSAITHFPEDFRRAG
DLPAAAE
-Exemplary Methylobacterium sp. XJLW Formate Dehydrogenase
Subunit Alpha (FDH4) Amino Acid Sequence
SEQ ID NO: 227
MSNAPEQHGDKTEKSEIRADGLQDAGGPAQGPKPEAGGSYSEGAKAGGQAAPEPSGLHDLKGRP
TAPPTIAFELDGQQVEAAPGETIWAVAKRLGTHIPHLCHKPEPGYRPDGNCRACMVEIEGERVL
AASCKRTPAVGMKVKTATERATKARAMVLELLVADQPERETSHDPTSHFWVQADFLDVSESRFP
AAERWTGDFSHPAMSVNLDACIQCNLCVRACREVQVNDVIGMAYRSAGAKVVFDFDDPMGGSTC
VACGECVQACPTGALMPSAYLDAEHKTRTVYPDREVTSLCPYCGVGCQVSYKVKDEKIVYAEGV
NGPANHNRLCVKGRFGFDYVHHPHRLTAPLIRLDNIPKDANDQVDPANPWTHFREATWEEALDR
AAGGLKTVRDTHGRKALAGFGSAKGSNEEAYLFQKLVRLGFGSNNVDHCTRLCHASSVAALMEG
LNSGAVSAPFSAALDAEVIIVIGANPTVNHPVAATFLKNAVKQRGAKLIVMDPRRQVLSRHAYK
HLAFKPGSDVAMLNAMLNVIIEERLYDEQYIAGYTENFEALKEKIVEFTPEKMASVCGIDAETL
REVARLYARAKSSIIFWGMGISQHVHGTDNSRCLIALALVTGQIGRPGTGLHPLRGQNNVQGAS
DAGLIPMVYPDYQSVEKAAVREMFEEFWGQKLDPQRGLTVVEIMRAIHAGEIKGMFVEGENPAM
SDPDLNHARHALAMLDHLVVQDLFLTETAFHADVVLPASAFAEKAGTFTNTDRRVQISQPVVSP
PGDARQDWWIIQELGKPLGLPWNYGGPADIFREMAMVMPSFNNITWERLEREGAVTYPVDAPDK
PGNEIIFYAGFPTESGRAKIVPAAVVPPDELPDEDYPMVLSTGRVLEPWHTGSMTRRAGVLDAL
EPEAVAFMAPKELYRLGLEPGDTMKLETRRGAVHLKVRSDRDVPVGMIFMPFCYAEAAANLLIN
PALDPMGKIPEFKFCAARASAVHATPMAAE
-Exemplary Methylobacterium sp. XJLW Formate Dehydrogenase-N
Subunit Alpha (FDH5) Amino Acid Sequence
SEQ ID NO: 228
MTNLWMDIKHADVITVMGGNAAEAHPCGFKWVVEAKAHNNAKLIVVDPRFTRTASVADLYCPIR
QGTDIAFLSGVAKYLLDNDKLQHRYVSAYTNAGYVVREGYDFSEGLFAGYDADKRDYDKTTWDY
EIGPDGYAVVDETLQHPRCVMQLLKKHVALYTPEMVEKICGSPKDTFLKVCELIATTAAPDRVM
TSLYALGWTHHSKGSQNIRSMCIVQTLLGNIGMLGGGMNALRGHSNIQGLTDIGLMSNLIPGYL
NIPVEKEPDYASYIAKRQFKPLRPGQTSYWQNYNKFFVSFQKAMWGDKAQKENDWAYDYLPKLD
VPTYDVLRGFELAKQGKMTGYVIQGFNPLLSFPNRAKMTEAFSKMKFLVVMDPLKTETARFWEN
HGEYNDVDPTKIQTEVFELPTTLFVEEEGSLSNSSRWLQWHWQAQDAPGECRSDIEIMSEIFLR
IRGAYKKDGGAFSDPIVNLKWDYAIAESPTPTELARELNGYTLAPTPDLNGTVIPAGKQVDGFA
QLKDDGTTACGCWIYSGCYTEKGNMMARRDNTDPGDRGIAPNWAFAWPANRRVLYNRASCDPEG
RPWSEKKKLIEWNGKQWIGFDVPDYGVTVAPDKGVGPFILNQEGVARLWTRGLMRDGPFPTHYE
PFESPVQNVAFPKIKGAPAARIFKDDLADLGDAKDFPYAATSYRLTEHFHGWTKHARINAILQP
EAFVEISEELAKEKGIAKGGWVRVWSKRGSLKAKAVVTKRIKPLICDGKPVHVVGIPQHWGFMG
HTKKGWHPNSLTPVVGDANTETPEFKAWLVNIEPTTPPSDAVA
-Exemplary Methylobacterium sp. XJLW Formate Dehydrogenase-
Subunit Gamma (FDH6) Amino Acid Sequence
SEQ ID NO: 229
MARHEPWSAERASKIIAEHTHLEGATLPILHALQETFGYVDSGAVPLIADALNLSRAEVHGCIT
FYHDFRAHPAGRHEVKLCRAEACQAMGSDKLHREILGRLGCGWHETTADGSATVEPVYCLGLCA
NGPAALVDGEPVAHLTADALEAALTEVRQ
-Exemplary Methylobacterium sp. XJLW Formate Dehydrogenase-
Subunit Gamma (FDH7) Nucleic Acid Coding Sequence
SEQ ID NO: 230
ATGTACGTCCCGCGCTACACCGGCGTGCAGCGCGTGAACCACTGGATCACCGCGATCCTGTTCA
CGCTGCTGACCCTGTCGGGCCTGGCGATGTTCACGCCCTACCTGTTCTCGCTCACCGGCCTGTT
CGGTGGCGGGCAGGCGACCCGGGCGATCCATCCCTGGTTCGGCGTGGCGCTGGCGGTCAGCTTC
TTCTTCCTGTTCGTGCGCTTCTGGAAGCTCAACATCCCCAACAAGGACGATGTCGAGTGGACGA
AGCATATCGGCGACGTGGTCACCAACCGTGAGGACCGGCTCCCGGAGCTCGGCAAGTACAATGC
CGGACAGAAGGGCGTGTTCTGGGGGCAGACCGCGCTGATCGGCGTGATGTTCGTCACCGGGCTC
GTGATCTGGAACACCTATTTCGGCGGCCTCACCTCCATCGAGACCCAGCGCTGGGCGCTTCTGG
CCCACTCCCTCGCCGCGGTGATCGCCATCGCGATCATCGTGGTGCACATCTACGCCGGCATCTG
GGTCCGCGGCACCGGCCGGGCGATGGTCCGCGGCACGGTCACGGGCGGCTGGGCCTACCGCCAT
CACCGCAAGTGGTTCCGTCAGATGGCCGGCGGCACGGGCCGCCGGGGTTCGGTGGACAAGCGCG
GATCCTGA
-Exemplary Methylobacterium sp. XJLW Formate Dehydrogenase-
Subunit Gamma (FDH7) Amino Acid Sequence
SEQ ID NO: 231
MYVPRYTGVQRVNHWITAILFTLLTLSGLAMFTPYLFSLTGLFGGGQATRAIHPWFGVALAVSF
FFLFVRFWKLNIPNKDDVEWTKHIGDVVTNREDRLPELGKYNAGQKGVFWGQTALIGVMFVTGL
VIWNTYFGGLTSIETQRWALLAHSLAAVIAIAIIVVHIYAGIWVRGTGRAMVRGTVTGGWAYRH
HRKWFRQMAGGTGRRGSVDKRGS
-Exemplary Methylobacterium sp. XJLW Formate Dehydrogenase-
Subunit Beta (FDH8) Nucleic Acid Coding Sequence
SEQ ID NO: 232
ATGGCTGACTACAGCTCCCTCGACATCCGCCAGCGTTCCGCCTCCACGGAGACGCCGCCGGAGA
TCCGCCGCCAGGTGGAGGTCGCCAAGCTCATCGACGTGTCGAAGTGCATCGGCTGCAAGGCCTG
CCAATCGGCCTGCGAGGAGTGGAACGACCTCCGCGACGATATCGGCGTCAACACGGGCACGTAT
CAGAACCCCCACGACCTCACCCCGAAGTCGTGGACCCTGATGCGGTTCACCGAGTACGAGAACC
CCGAGACCCAGAACCTCGAATGGCTGATCCGCAAGGACGGCTGCATGCACTGCACCGAGCCGGG
CTGCCTGAAGGCCTGCCCGTCCCCCGGCGCCATCGTGCAGTACTCCAACGGCATCGTCGACTTC
ATCGAGGAGAACTGCATCGGCTGCGGCTATTGCGTGAAGGGTTGCCCCTTTAACATCCCGCGCA
TCAGCCAGACCGACCACAAGGCGTACAAGTGCACCCTGTGCTCGGACCGGGTGGCGGTGGGTCA
GGCTCCGGCCTGCGCCAAGGCCTGCCCGACCGGCTCGATCATGTTCGGCACCAAGCAGGCCATG
ATCGACCAGGCGCATGACCGCGTCGAGGATCTGAAGTCGCGCGGCTTCGCGCATGCCGGCCTCT
ACGACCCGGCCGGCGTCGGCGGCACGCACGTCATGTACGTGCTGCACCACGCCGACCAACCGAG
CCTCTACGCCGGTCTGCCGAACGACCCGAAGATCTCGCCGCTCGTCGCCTTCTGGAAGGGCGGA
GCGAAGGTGTTCGGTCTCGCTGCCATGGGCTTCGCCGCGGTGGCGGGCTTCTTCCACTACGTGA
CGGCCGGCCCCAACGAGGTCGTGCCCGAAGAGGAGGAAGAGGCGGTCGAATACGACGAGGCCAA
GCGCCGCGAGACCGGCGGCGGCGAGGCCAGGCCGCACTGA
-Exemplary Methylobacterium sp. XJLW Formate Dehydrogenase-
Subunit Beta (FDH8) Amino Acid Sequence
SEQ ID NO: 233
MADYSSLDIRQRSASTETPPEIRRQVEVAKLIDVSKCIGCKACQSACEEWNDLRDDIGVNTGTY
QNPHDLTPKSWTLMRFTEYENPETQNLEWLIRKDGCMHCTEPGCLKACPSPGAIVQYSNGIVDF
IEENCIGCGYCVKGCPFNIPRISQTDHKAYKCTLCSDRVAVGQAPACAKACPTGSIMFGTKQAM
IDQAHDRVEDLKSRGFAHAGLYDPAGVGGTHVMYVLHHADQPSLYAGLPNDPKISPLVAFWKGG
AKVFGLAAMGFAAVAGFFHYVTAGPNEVVPEEEEEAVEYDEAKRRETGGGEARPH
-Exemplary Pseudomonas putida Formate Dehydrogenase (FDHP)
Amino Acid Sequence
SEQ ID NO: 234
MAKVLCVLYDDPVDGYPKTYARDDLPKIDHYPGGQTLPTPKAIDFTPGQLLGSVSGELGLRKYL
ESNGHTLVVTSDKDGPDSVFERELVDADVVISQPFWPAYLTPERIAKAKNLKLALTAGIGSDHV
DLQSAIDRNVTVAEVTYCNSISVAEHVVMMILSLVRNYLPSHEWARKGGWNIADCVSHAYDLEA
MHVGTVAAGRIGLAVLRRLAPFDVHLHYTDRHRLPESVEKELNLTWHATREDMYPVCDVVTLNC
PLHPETEHMINDETLKLFKRGAYIVNTARGKLCDRDAVARALESGRLAGYAGDVWFPQPAPKDH
PWRTMPYNGMTPHISGTTLTAQARYAAGTREILEXFFEGRPIRDEYLIVQGGALAGTGAHSYSK
GNATGGSEEAAKFKKAV
-Exemplary Arabidopsis thaliana Formate Dehydrogenase (Chloroplastic
AtFDH1.1) Nucleic Acid Coding Sequence
SEQ ID NO: 235
ATGGCGATGAGACAAGCCGCTAAGGCAACGATCAGGGCCTGTTCTTCCTCTTCTTCTTCGGGTT
ACTTCGCTCGACGTCAGTTTAATGCATCTTCTGGTGATAGCAAAAAGATTGTAGGAGTTTTCTA
CAAGGCCAACGAATACGCTACCAAGAACCCTAACTTCCTTGGCTGCGTCGAGAATGCCTTAGGA
ATCCGTGACTGGCTTGAATCCCAAGGACATCAGTACATCGTCACTGATGACAAGGAAGGCCCTG
ATTGCGAACTTGAGAAACATATCCCGGATCTTCACGTCCTAATCTCCACTCCCTTCCACCCGGC
GTATGTAACTGCTGAAAGAATCAAGAAAGCCAAAAACTTGAAGCTTCTCCTCACAGCTGGTATT
GGCTCGGATCATATTGATCTCCAGGCAGCTGCAGCTGCTGGCCTGACGGTTGCTGAAGTCACGG
GAAGCAACGTGGTCTCAGTGGCAGAAGATGAGCTCATGAGAATCTTAATCCTCATGCGCAACTT
CGTACCAGGGTACAACCAGGTCGTCAAAGGCGAGTGGAACGTCGCGGGCATTGCGTACAGAGCT
TATGATCTTGAAGGGAAGACGATAGGAACCGTGGGAGCTGGAAGAATCGGAAAGCTTTTGCTGC
AGCGGTTGAAACCATTCGGGTGTAACTTGTTGTACCATGACAGGCTTCAGATGGCACCAGAGCT
GGAGAAAGAGACTGGAGCTAAGTTCGTTGAGGATCTGAATGAAATGCTCCCTAAATGTGACGTT
ATAGTCATCAACATGCCTCTCACGGAGAAGACAAGAGGAATGTTCAACAAAGAGTTGATAGGGA
AATTGAAGAAAGGCGTTTTGATAGTGAACAACGCAAGAGGAGCCATCATGGAGAGGCAAGCAGT
GGTGGATGCGGTGGAGAGTGGACACATTGGAGGGTACAGCGGAGACGTTTGGGACCCACAGCCA
GCTCCTAAGGACCATCCATGGCGTTACATGCCTAACCAGGCTATGACCCCTCATACCTCCGGCA
CCACCATTGACGCTCAGCTACGGTATGCGGGGGGACGAAAGACATGTTGGAGAGATACTTCAA
GGGAGAAGACTTCCCTACTGAGAATTACATCGTCAAGGACGGTGAACTTGCTCCTCAGTACCGG
TAA
-Exemplary Arabidopsis thaliana Formate Dehydrogenase (Chloroplastic
AtFDH1.1) Amino Acid Sequence
SEQ ID NO: 236
MAMRQAAKATIRACSSSSSSGYFARRQFNASSGDSKKIVGVFYKANEYATKNPNFLGCVENALG
IRDWLESQGHQYIVTDDKEGPDCELEKHIPDLHVLISTPFHPAYVTAERIKKAKNLKLLLTAGI
GSDHIDLQAAAAAGLTVAEVTGSNVVSVAEDELMRILILMRNFVPGYNQVVKGEWNVAGIAYRA
YDLEGKTIGTVGAGRIGKLLLQRLKPFGCNLLYHDRLQMAPELEKETGAKFVEDLNEMLPKCDV
IVINMPLTEKTRGMFNKELIGKLKKGVLIVNNARGAIMERQAVVDAVESGHIGGYSGDVWDPQP
APKDHPWRYMPNQAMTPHTSGTTIDAQLRYAAGTKDMLERYFKGEDFPTENYIVKDGELAPQYR
-Exemplary Arabidopsis thaliana Formate Dehydrogenase
(Mitochondrial AtFDH1.2) Nucleic Acid Coding Sequence
SEQ ID NO: 237
ATGATTTTTCAGAGTTTTAGCCTTTTGAACTTGCTTATGAAACAGGCATCTTCTGGTGATAGCA
AAAAGATTGTAGGAGTTTTCTACAAGGCCAACGAATACGCTACCAAGAACCCTAACTTCCTTGG
CTGCGTCGAGAATGCCTTAGGAATCCGTGACTGGCTTGAATCCCAAGGACATCAGTACATCGTC
ACTGATGACAAGGAAGGCCCTGATTGCGAACTTGAGAAACATATCCCGGATCTTCACGTCCTAA
TCTCCACTCCCTTCCACCCGGCGTATGTAACTGCTGAAAGAATCAAGAAAGCCAAAAACTTGAA
GCTTCTCCTCACAGCTGGTATTGGCTCGGATCATATTGATCTCCAGGCAGCTGCAGCTGCTGGC
CTGACGGTTGCTGAAGTCACGGGAAGCAACGTGGTCTCAGTGGCAGAAGATGAGCTCATGAGAA
TCTTAATCCTCATGCGCAACTTCGTACCAGGGTACAACCAGGTCGTCAAAGGCGAGTGGAACGT
CGCGGGCATTGCGTACAGAGCTTATGATCTTGAAGGGAAGACGATAGGAACCGTGGGAGCTGGA
AGAATCGGAAAGCTTTTGCTGCAGCGGTTGAAACCATTCGGGTGTAACTTGTTGTACCATGACA
GGCTTCAGATGGCACCAGAGCTGGAGAAAGAGACTGGAGCTAAGTTCGTTGAGGATCTGAATGA
AATGCTCCCTAAATGTGACGTTATAGTCATCAACATGCCTCTCACGGAGAAGACAAGAGGAATG
TTCAACAAAGAGTTGATAGGGAAATTGAAGAAAGGCGTTTTGATAGTGAACAACGCAAGAGGAG
CCATCATGGAGAGGCAAGCAGTGGTGGATGCGGTGGAGAGTGGACACATTGGAGGGTACAGCGG
AGACGTTTGGGACCCACAGCCAGCTCCTAAGGACCATCCATGGCGTTACATGCCTAACCAGGCT
ATGACCCCTCATACCTCCGGCACCACCATTGACGCTCAGCTACGGTATGCGGCGGGGACGAAAG
ACATGTTGGAGAGATACTTCAAGGGAGAAGACTTCCCTACTGAGAATTACATCGTCAAGGACGG
TGAACTTGCTCCTCAGTACCGGTAA
-Exemplary Arabidopsis thaliana Formate Dehydrogenase
(Mitochondrial AtFDH1.2) Amino Acid Sequence
SEQ ID NO: 238
MIFQSFSLLNLLMKQASSGDSKKIVGVFYKANEYATKNPNFLGCVENALGIRDWLESQGHQYIV
TDDKEGPDCELEKHIPDLHVLISTPFHPAYVTAERIKKAKNLKLLLTAGIGSDHIDLQAAAAAG
LTVAEVTGSNVVSVAEDELMRILILMRNFVPGYNQVVKGEWNVAGIAYRAYDLEGKTIGTVGAG
RIGKLLLQRLKPFGCNLLYHDRLQMAPELEKETGAKFVEDLNEMLPKCDVIVINMPLTEKTRGM
FNKELIGKLKKGVLIVNNARGAIMERQAVVDAVESGHIGGYSGDVWDPQPAPKDHPWRYMPNQA
MTPHTSGTTIDAQLRYAAGTKDMLERYFKGEDFPTENYIVKDGELAPQYR
-Exemplary Arabidopsis thaliana Formate Dehydrogenase (AtFDH1.3)
Nucleic Acid Coding Sequence
SEQ ID NO: 239
ATGAAACAAGCCAGTTCAGGCGATTCAAAAAAGATAGTCGGGGTGTTTTATAAAGCTAACGAGT
ACGCCACAAAGAATCCAAACTTTCTTGGCTGCGTCGAAAACGCTCTTGGGATACGGGATTGGCT
CGAATCCCAAGGTCATCAATATATTGTGACAGATGACAAGGAAGGTCCCGATTGTGAATTAGAG
AAACATATTCCCGATTTACATGTATTGATATCAACACCCTTTCACCCCGCCTATGTAACTGCTG
AGAGGATTAAAAAGGCCAAAAATTTGAAACTCCTATTGACTGCCGGGATAGGATCAGACCACAT
AGATTTACAAGCCGCTGCAGCCGCTGGGCTGACAGTCGCGGAGGTGACGGGATCCAACGTTGTA
TCTGTAGCCGAGGATGAGCTCATGAGAATACTGATCTTAATGCGGAACTTTGTACCTGGATATA
ATCAAGTAGTTAAGGGTGAGTGGAATGTTGCGGGTATTGCCTATAGAGCATACGACTTAGAGGG
GAAAACGATCGGTACCGTGGGCGCCGGGCGTATTGGTAAATTACTTCTGCAAAGACTTAAACCC
TTTGGGTGTAATCTACTCTATCACGATAGACTTCAGATGGCACCCGAATTGGAAAAAGAGACTG
GAGCGAAATTCGTAGAGGACCTTAATGAAATGTTACCTAAATGCGACGTAATAGTCATTAATAT
GCCCCTAACCGAAAAAACTAGAGGTATGTTTAACAAAGAACTCATCGGTAAGTTAAAAAAGGGC
GTCTTGATTGTTAATAACGCCCGAGGAGCTATCATGGAGCGCCAAGCCGTTGTCGACGCTGTAG
AAAGTGGACACATTGGCGGGTATTCTGGGGATGTCTGGGATCCCCAACCAGCTCCTAAGGATCA
TCCTTGGCGGTACATGCCAAATCAAGCCATGACACCTCATACATCCGGCACCACTATAGATGCA
CAATTACGATATGCCGCTGGCACAAAAGATATGCTTGAACGGTATTTTAAGGGAGAGGACTTTC
CCACAGAAAATTATATTGTAAAGGATGGGGAGTTGGCTCCCCAGTATAGATAA
-Exemplary Arabidopsis thaliana Formate Dehydrogenase (AtFDH1.3)
Amino Acid Sequence
SEQ ID NO: 240
MKQASSGDSKKIVGVFYKANEYATKNPNFLGCVENALGIRDWLESQGHQYIVTDDKEGPDCELE
KHIPDLHVLISTPFHPAYVTAERIKKAKNLKLLLTAGIGSDHIDLQAAAAAGLTVAEVTGSNVV
SVAEDELMRILILMRNFVPGYNQVVKGEWNVAGIAYRAYDLEGKTIGTVGAGRIGKLLLQRLKP
FGCNLLYHDRLQMAPELEKETGAKFVEDLNEMLPKCDVIVINMPLTEKTRGMENKELIGKLKKG
VLIVNNARGAIMERQAVVDAVESGHIGGYSGDVWDPQPAPKDHPWRYMPNQAMTPHTSGITIDA
QLRYAAGTKDMLERYFKGEDFPTENYIVKDGELAPQYR

### Serine Hydroxymethyltransferase 1, Mitochondrial (SHM1)

[0383] In certain embodiments, a composition described herein comprises at least one transgenic SHM1 enzyme. In some embodiments, SHM1 enzymes catalyze the interconversion of serine and glycine.

[0384] In some embodiments, a SHM1 gene and/or transgene comprises a sequence encoding a peptide sequence that is at least 90%, 91%, 92%, 93%, 94%, 95%, 96%, 97%, 98%, 99%, or 100% identical to SEQ ID NO: 404 (or a portion thereof). In some embodiments, a FDH gene and/or transgene comprises a nucleotide sequence that is at least 90%, 91%, 92%, 93%, 94%, 95%, 96%, 97%, 98%, 99%, or 100% identical to SEQ ID NO: 403 (or a portion thereof).

-Exemplary Arabidopsis thaliana Serine hydroxymethyltransferase 1,
mitochondrial (SHM1) Nucleic Acid Coding Sequence
SEQ ID NO: 403
ATGGCGATGGCCATGGCTCTTCGAAGGCTTTCTTCTTCAATTGACAAACCCATTCGTCCTCTTA
TTCGATCCACTTCATGTTACATGTCTTCTTTGCCCAGTGAAGCTGTTGATGAGAAGGAAAGATC
TCGTGTCACTTGGCCAAAACAGCTTAACGCACCTTTAGAGGAGGTTGATCCTGAGATTGCTGAC
ATTATTGAGCATGAGAAAGCTAGACAATGGAAGGGACTTGAACTTATTCCATCTGAGAACTTCA
CATCTGTGTCGGTGATGCAAGCTGTTGGGTCTGTCATGACTAACAAATACAGTGAAGGCTATCC
TGGTGCCAGATACTATGGAGGAAATGAGTATATAGACATGGCAGAAACCTTATGCCAGAAGCGC
GCTCTTGAAGCTTTCCGGTTAGATCCTGAAAAGTGGGGAGTGAATGTTCAACCTTTGTCTGGAT
CTCCTGCCAACTTCCATGTGTACACTGCATTGTTAAAGCCTCATGAAAGAATCATGGCACTTGA
TCTTCCTCATGGTGGTCATCTTTCTCATGGTTATCAGACTGACACCAAGAAGATATCAGCTGTG
TCTATCTTCTTTGAAACAATGCCCTATAGATTGGACGAGAGCACTGGCTACATCGACTACGATC
AGATGGAGAAAAGTGCTACTCTTTTCAGGCCAAAATTGATTGTTGCTGGTGCAAGTGCTTATGC
TAGATTGTATGACTATGCCCGCATCAGAAAGGTCTGTAACAAGCAAAAAGCTGTAATGCTAGCA
GATATGGCACACATCAGTGGTTTGGTTGCTGCTAATGTAATCCCTTCACCGTTCGACTATGCTG
ATGTTGTAACCACCACAACTCACAAGTCACTTCGTGGACCCCGTGGAGCCATGATTTTCTTCAG
AAAGGGTGTTAAGGAAATTAACAAGCAAGGGAAAGAGGTTTTGTATGATTTTGAAGACAAGATC
AACCAAGCTGTCTTCCCTGGTCTTCAAGGTGGTCCACACAACCACACTATCACAGGACTAGCTG
TTGCTTTGAAACAGGCAACTACTTCAGAGTACAAAGCATACCAAGAACAAGTCCTGAGTAACAG
TGCAAAGTTTGCTCAGACTCTAATGGAGAGAGGATATGAACTTGTTTCTGGTGGAACTGACAAC
CATCTGGTTCTAGTGAATCTAAAGCCCAAGGGAATTGATGGATCTAGAGTTGAGAAAGTGTTGG
AAGCTGTTCACATTGCATCCAACAAAAACACTGTTCCTGGAGATGTTTCTGCCATGGTTCCTGG
TGGAATCAGAATGGGTACTCCTGCTCTCACTTCCAGAGGCTTTGTTGAGGAAGACTTTGCCAAA
GTAGCTGAATACTTCGACAAAGCTGTGACAATAGCTCTCAAAGTCAAATCTGAAGCTCAAGGAA
CCAAGTTGAAGGATTTCGTGTCAGCAATGGAATCCTCTTCAACCATCCAATCCGAGATTGCGAA
ACTGCGCCATGAAGTCGAGGAATTCGCTAAGCAGTTCCCAACAATTGGGTTTGAGAAAGAAACC
ATGAAGTACAAGAACTAA
-Exemplary Arabidopsis thaliana Serine hydroxymethyltransferase 1,
mitochondrial (SHM1) Amino Acid Sequence
SEQ ID NO: 404
MAMAMALRRLSSSIDKPIRPLIRSTSCYMSSLPSEAVDEKERSRVTWPKQLNAPLEEVDPEIAD
IIEHEKARQWKGLELIPSENFTSVSVMQAVGSVMINKYSEGYPGARYYGGNEYIDMAETLCQKR
ALEAFRLDPEKWGVNVQPLSGSPANFHVYTALLKPHERIMALDLPHGGHLSHGYQTDTKKISAV
SIFFETMPYRLDESTGYIDYDQMEKSATLFRPKLIVAGASAYARLYDYARIRKVCNKQKAVMLA
DMAHISGLVAANVIPSPFDYADVVTTTTHKSLRGPRGAMIFFRKGVKEINKQGKEVLYDFEDKI
NQAVFPGLQGGPHNHTITGLAVALKQATTSEYKAYQEQVLSNSAKFAQTLMERGYELVSGGTDN
HLVLVNLKPKGIDGSRVEKVLEAVHIASNKNTVPGDVSAMVPGGIRMGTPALTSRGFVEEDFAK
VAEYFDKAVTIALKVKSEAQGTKLKDFVSAMESSSTIQSEIAKLRHEVEEFAKQFPTIGFEKET
MKYKN

### (S)-2-Hydroxy-Acid Oxidase (GLO)

[0385] In certain embodiments, a composition described herein comprises at least one transgenic GLO1 and/or GLO2 enzyme. In some embodiments, GLO enzymes catalyze the interconversion of (2S)-2-hydroxycarboxylate and 2-oxocarboxylate.

[0386] In some embodiments, a GLO gene and/or transgene comprises a sequence encoding a peptide sequence that is at least 90%, 91%, 92%, 93%, 94%, 95%, 96%, 97%, 98%, 99%, or 100% identical to SEQ ID NO: 406 or 408 (or a portion thereof). In some embodiments, a FDH gene and/or transgene comprises a nucleotide sequence that is at least 90%, 91%, 92%, 93%, 94%, 95%, 96%, 97%, 98%, 99%, or 100% identical to SEQ ID NO: 405 or 407 (or a portion thereof).

-Exemplary Arabidopsis thaliana (S)-2-hydroxy-acid oxidase (GLO1)
Nucleic Acid Coding Sequence
SEQ ID NO: 405
ATGGAGATCACTAACGTTACCGAGTATGATGCAATCGCAAAGCAGAAGCTGCCTAAGATGGTGT
ACGACTACTATGCATCTGGTGCAGAAGACCAATGGACTCTTCAAGAGAACAGAAACGCTTTTGC
AAGGATCCTCTTTCGGCCTCGGATTCTGATTGATGTGAGCAAGATTGACATGACAACCACCGTC
TTGGGGTTCAAGATCTCGATGCCCATCATGGTTGCTCCAACTGCCATGCAAAAGATGGCTCACC
CTGATGGGGAATATGCTACTGCTAGAGCTGCATCTGCAGCTGGAACTATCATGACACTATCTTC
ATGGGCTACTTCCAGCGTTGAAGAAGTTGCGTCTACAGGGCCAGGGATCCGATTCTTCCAGCTC
TATGTATACAAGAACAGGAATGTGGTTGAGCAGCTCGTGAGAAGAGCTGAGAGGGCTGGGTTCA
AAGCCATTGCTCTCACTGTAGACACCCCAAGGCTAGGCCGCAGAGAGTCTGATATCAAGAACAG
ATTCACTTTGCCTCCAAACCTGACATTGAAGAACTTTGAAGGACTTGACCTCGGAAAGATGGAC
GAGGCCAATGACTCTGGCTTGGCTTCATATGTTGCTGGTCAAATTGACCGTACCTTAAGCTGGA
AGGATGTCCAGTGGCTCCAGACAATCACCAAGTTGCCCATTCTTGTCAAAGGTGTTCTTACAGG
AGAGGATGCAAGGATAGCGATTCAAGCTGGTGCAGCCGGAATCATTGTATCAAACCATGGAGCT
CGCCAGCTTGACTATGTCCCAGCAACCATCTCGGCCCTTGAAGAGGTTGTCAAAGCGACACAAG
GACGAATTCCTGTCTTCTTGGATGGTGGTGTTCGACGTGGCACTGATGTCTTCAAAGCACTTGC
ACTTGGAGCCTCCGGGATATTTATTGGAAGACCAGTGGTATTCTCATTGGCAGCTGAAGGAGAG
GCTGGAGTTAGAAAGGTGCTTCAAATGCTACGTGATGAGTTCGAGCTGACCATGGCACTGAGTG
GGTGTCGGTCCCTAAAGGAAATCTCCCGTAACCACATTACCACCGAATGGGACACTCCACGTCC
TTCAGCCAGGTTATAG
-Exemplary Arabidopsis thaliana (S)-2-hydroxy-acid oxidase (GLO1)
Amino Acid Sequence
SEQ ID NO: 406
MEITNVTEYDAIAKQKLPKMVYDYYASGAEDQWTLQENRNAFARILFRPRILIDVSKIDMTTTV
LGFKISMPIMVAPTAMQKMAHPDGEYATARAASAAGTIMTLSSWATSSVEEVASTGPGIRFFQL
YVYKNRNVVEQLVRRAERAGFKAIALTVDTPRLGRRESDIKNRFTLPPNLTLKNFEGLDLGKMD
EANDSGLASYVAGQIDRTLSWKDVQWLQTITKLPILVKGVLIGEDARIAIQAGAAGIIVSNHGA
RQLDYVPATISALEEVVKATQGRIPVFLDGGVRRGTDVFKALALGASGIFIGRPVVFSLAAEGE
AGVRKVLQMLRDEFELTMALSGCRSLKEISRNHITTEWDTPRPSARL
-Exemplary Arabidopsis thaliana (S)-2-hydroxy-acid oxidase (GLO2)
Nucleic Acid Coding Sequence
SEQ ID NO: 407
ATGGAGATCACTAACGTTACCGAGTATGATGCAATCGCAAAGGCGAAGTTGCCTAAGATGGTAT
ATGACTACTATGCATCTGGTGCAGAAGATCAATGGACTCTTCAAGAGAACAGAAACGCTTTTGC
AAGAATCCTCTTCCGGCCTCGGATTTTGATTGATGTGAACAAAATTGATATGGCGACTACCGTC
TTGGGGTTCAAGATCTCGATGCCGATCATGGTTGCTCCTACTGCCTTTCAAAAGATGGCTCACC
CTGATGGGGAATATGCTACGGCTAGAGCTGCGTCTGCTGCTGGAACCATCATGACACTATCTTC
ATGGGCTACTTCAAGTGTTGAAGAAGTTGCTTCCACAGGGCCAGGAATCCGATTCTTCCAGCTC
TATGTATACAAGAACAGGAAGGTGGTTGAGCAGCTCGTGAGAAGAGCCGAGAAAGCTGGGTTCA
AAGCCATTGCTCTCACTGTAGACACCCCAAGGCTAGGTCGCAGAGAGTCTGATATCAAGAACAG
ATTCACTTTGCCTCCAAACCTGACATTGAAGAACTTTGAAGGTCTTGACCTTGGAAAGATGGAC
GAGGCCAATGACTCTGGCTTGGCTTCGTATGTTGCTGGTCAAATTGACCGTACCTTGAGCTGGA
AGGATATCCAGTGGCTCCAAACAATCACCAACATGCCAATTCTTGTCAAGGGTGTTCTTACAGG
AGAGGATGCAAGGATAGCGATTCAAGCTGGAGCAGCAGGGATCATTGTGTCAAATCATGGAGCT
CGCCAGCTTGATTATGTCCCAGCAACAATCTCAGCCCTTGAAGAGGTTGTCAAAGCAACACAAG
GACGAGTTCCTGTCTTCTTGGATGGTGGTGTTCGACGTGGCACTGATGTCTTCAAGGCACTTGC
ACTTGGAGCCTCTGGAATATTTATTGGAAGACCAGTGGTTTTTGCACTAGCTGCTGAAGGAGAA
GCCGGAGTCAAAAAGGTGCTTCAAATGTTGCGTGATGAGTTCGAGCTAACCATGGCACTAAGTG
GGTGCCGGTCACTCAGTGAAATCACCCGTAACCACATTGTCACGGAATGGGACACTCCACGCCA
TTTGCCCAGGTTATAG
-Exemplary Arabidopsis thaliana (S)-2-hydroxy-acid oxidase (GLO2)
Amino Acid Sequence
SEQ ID NO: 408
MEITNVTEYDAIAKAKLPKMVYDYYASGAEDQWTLQENRNAFARILFRPRILIDVNKIDMATTV
LGFKISMPIMVAPTAFQKMAHPDGEYATARAASAAGTIMTLSSWATSSVEEVASTGPGIRFFQL
YVYKNRKVVEQLVRRAEKAGFKAIALTVDTPRLGRRESDIKNRFTLPPNLTLKNFEGLDLGKMD
EANDSGLASYVAGQIDRTLSWKDIQWLQTITNMPILVKGVLTGEDARIAIQAGAAGIIVSNHGA
RQLDYVPATISALEEVVKATQGRVPVFLDGGVRRGTDVFKALALGASGIFIGRPVVFALAAEGE
AGVKKVLQMLRDEFELTMALSGCRSLSEITRNHIVTEWDTPRHLPRL

### F) Homoserine Pathway

[0387] In some embodiments, compositions and methods described herein comprise introduction of one or more genes coding for one or more enzymes involved in the metabolism of HCHO to act as a carbon source to synthesize homoserine. In some embodiments of such a metabolic pathway, HCHO may be metabolized through the following metabolic mechanism (pathway 7): 1) serine aldolase (SAL) or threonine aldolase (LtaE) combining HOCH with glycine to form serine 2) serine being then deaminated to pyruvate by serine deaminase (SDA) 3) 4-hydroxy-2-oxobutanoate (HOB) aldolase (HAL) combining formaldehyde and pyruvate to from HOB 4) HOB aminotransferase (HAT) turning HOB into homoserine 5) homoserine (HSer) integrating various endogenous plant metabolic pathways. In certain embodiments, one or more of the enzymatic components of this pathway may be introduced as a transgene as described herein (see FIGS. 4-9).

### Serine Aldolase (SAL) or Threonine Aldolase (LtaE)

[0388] In some embodiments, a composition described herein comprises a transgenic SAL and/or LtaE protein. In some embodiments, such a protein, among other things, may utilize formaldehyde as a substrate and produce serine.

[0389] In some embodiments, a SAL or LtaE gene and/or transgene comprises a sequence encoding a peptide sequence that is at least 90%, 91%, 92%, 93%, 94%, 95%, 96%, 97%, 98%, 99%, or 100% identical to SEQ ID NO: 241 (or a portion thereof).

-Exemplary Escherichia coli Serine Aldolase and/or Threonine aldolase
(SAL and/or LtaE) Amino Acid Sequence
SEQ ID NO: 241
MIDLRSDTVTRPSRAMLEAMMAAPVGDDVYGDDPTVNALQDYAAELSGKEAAIFLPTGTQANLV
ALLSHCERGEEYIVGQAAHNYLFEAGGAAVLGSIQPQPIDAAADGTLPLDKVAMKIKPDDIHFA
RTKLLSLENTHNGKVLPREYLKEAWEFTRERNLALHVDGARIFNAVVAYGCELKEITQYCDSFT
ICLSKGLGTPVGSLLVGNRDYIKRAIRWRKMTGGGMRQSGILAAAGIYALKNNVARLQEDHDNA
AWMAEQLREAGADVMRQDTNMLFVRVGEENAAALGEYMKARNVLINASPIVRLVTHLDVSREQL
AEVAAHWRAFLAR

Serine Deaminase (sdaA)

[0390] In some embodiments, a composition described herein comprises a transgenic sdaA protein. In some embodiments, such a protein, among other things, may utilize serine as a substrate and produce pyruvate.

[0391] In some embodiments, a sdaA gene and/or transgene comprises a sequence encoding a peptide sequence that is at least 90%, 91%, 92%, 93%, 94%, 95%, 96%, 97%, 98%, 99%, or 100% identical to SEQ ID NO: 242 (or a portion thereof).

-Exemplary Escherichia coli Serine Deaminase (sdaA) Amino Acid
Sequence
SEQ ID NO: 242
MISLFDMFKVGIGPSSSHTVGPMKAGKQFVDDLVEKGLLDSVTRVAVDVYGSLSLTGKGHHTDI
AIIMGLAGNEPATVDIDSIPGFIRDVEERERLLLAQGRHEVDFPRDNGMRFHNGNLPLHENGMQ
IHAYNGDEVVYSKTYYSIGGGFIVDEEHFGQDAANEVSVPYPFKSATELLAYCNETGYSLSGLA
MQNELALHSKKEIDEYFAHVWQTMQACIDRGMNTEGVLPGPLRVPRRASALRRMLVSSDKLSND
PMNVIDWVNMFALAVNEENAAGGRVVTAPTNGACGIVPAVLAYYDHFIESVSPDIYTRYFMAAG
AIGALYKMNASISGAEVGCQGEVGVACSMAAAGLAELLGGSPEQVCVAAEIGMEHNLGLTCDPV
AGQVQVPCIERNAIASVKAINAARMALRRTSAPRVSLDKVIETMYETGKDMNAKYRETSRGGLA
IKVQCD

### 4-Hydroxy-2-Oxobutanoate (HOB) Aldolase (HAL)

[0392] In some embodiments, a composition described herein comprises a transgenic HAL protein. In some embodiments, such a protein, among other things, may utilize pyruvate and HCHO substrates and produce 4-hydroxy-2-oxobutanoate.

[0393] In some embodiments, a HAL gene and/or transgene comprises a sequence encoding a peptide sequence that is at least 90%, 91%, 92%, 93%, 94%, 95%, 96%, 97%, 98%, 99%, or 100% identical to SEQ ID NO: 243 (or a portion thereof).

-Exemplary Escherichia coli 4-hydroxy-2-oxobutanoate Aldolase (HAL)
Amino Acid Sequence
SEQ ID NO: 243
MNALLSNPFKERLRKGEVQIGLWLSSTTAYMAEIAATSGYDWLLIDGEHAPNTIQDLYHQLQAV
APYASQPVIRPVEGSKPLIKQVLDIGAQTLLIPMVDTAEQARQVVSATRYPPYGERGVGASVAR
AARWGRIENYMAQVNDSLCLLVQVESKTALDNLDEILDVEGIDGVFIGPADLSASLGYPDNAGH
PEVQRIIETSIRRIRAAGKAAGFLAVAPDMAQQCLAWGANFVAVGVDTMLYSDALDQRLAMFKS
GKNGPRIKGSY

### HOB Aminotransferase (HAT)

[0394] In some embodiments, a composition described herein comprises a transgenic HAT protein. In some embodiments, such a protein, among other things, may HOB as a substrate and produce homoserine.

[0395] In some embodiments, a HAT gene and/or transgene comprises a sequence encoding a peptide sequence that is at least 90%, 91%, 92%, 93%, 94%, 95%, 96%, 97%, 98%, 99%, or 100% identical to SEQ ID NO: 244 (or a portion thereof).

-Exemplary Escherichia coli 4-hydroxy-2-oxobutanoate Aldolase (HAL)
Amino Acid Sequence
SEQ ID NO: 244
MFENITAAPADPILGLADLFRADERPGKINLGIGVYKDETGKTPVLTSVKKAEQYLLENETTKN
YLGIDGIPEFGRCTQELLFGKGSALINDKRARTAQTPGGTGALRVAADFLAKNTSVKRVWVSNP
SWPNHKSVENSAGLEVREYAYYDAENHTLDFDALINSLNEAQAGDVVLFHGCCHNPTGIDPTLE
QWQTLAQLSVEKGWLPLFDFAYQGFARGLEEDAEGLRAFAAMHKELIVASSYSKNFGLYNERVG
ACTLVAADSETVDRAFSQMKAAIRANYSNPPAHGASVVATILSNDALRAIWEQELTDMRQRIQR
MRQLFVNTLQEKGANRDFSFIIKQNGMFSFSGLTKEQVLRLREEFGVYAVASGRVNVAGMTPDN
MAPLCEAIVAVL

### G) Formolase Pathway

[0396] In some embodiments, the present disclosure provides compositions comprising novel combinations of species and metabolic pathways. In some embodiments, a “Formolase pathway” can be introduced into an ornamental plant species. Formolase, was recently engineered through a combination of computational protein design and directed evolution. Mass spectrometry revealed that the engineered enzyme produces two products of the formose reaction-dihydroxyacetone and glycolaldehyde—with the product profile dependent on the formaldehyde concentration (see e.g., Poust et al., Mechanistic Analysis of an Engineered Enzyme that Catalyzes the Formose Reaction, ChemBioChem 2015; which is incorporated herein by reference in its entirety). The formolase couples formaldehyde to form glycolaldehyde and dihydroxyacetone (DHA). At high formaldehyde concentrations DHA is the primary product, whereas at low formaldehyde concentrations glycoaldehyde is the primary product. In some embodiments, the formolase pathway, consisting of a small number of thermodynamically favorable chemical transformations that convert formate into a three-carbon sugar in central metabolism (see e.g. Siegel et al., Computational protein design enables a novel one-carbon assimilation pathway. PNAS 2015; which is incorporated herein by reference in its entirety). When supplemented with enzymes carrying out the other steps in the pathway, Formolase converts formate into dihydroxyacetone phosphate and other central metabolites in vitro. Unlike native carbon fixation pathways, this pathway is linear, not oxygen sensitive, and consists of a small number of thermodynamically favorable steps.

[0397] In certain embodiments, Formolase is a synthetic enzyme that uptakes 3 molecules of formaldehyde to produce DHA. In certain embodiments, if Formolase is combined with DAK, it can be used as an alternative to DAS, which only uptakes 1 formaldehyde for each DHA produced.

### BTEX Metabolism

[0398] In certain embodiments, the present disclosure provides compositions and methods suited for the relatively efficient biodegradation of benzene, toluene, ethylbenzene, and xylene. In certain embodiments, following ring cleavage, benzene and toluene can enter the Calvin cycle where they may be converted to organic molecules and/or amino acids. In some embodiments, a pathway that is engineered is described in FIG. 3.

[0399] Benzene and Ethylbenzene: In some embodiments, benzene and/or ethylbenzene can be remediated through the actions of transgenes encoding enzymes such as but not limited to: benzene 1,2-dioxygenase and/or cis-1,2-dihydrobenzene-1,2-diol dehydrogenase.

[0400] Toluene and Xylene: In some embodiments, the phytoremediation of these two pollutants can be enhanced through the addition of a pathway comprising, but not limited to, genes coding for toluene methyl-monooxygenase, aryl-alcohol dehydrogenase, benzaldehyde dehydrogenase (NAD+) and/or benzaldehyde dehydrogenase (NADP+).

### Benzene, Toluene, Ethylbenzene, and Xylene (BTEX) Metabolizing Enzymes

[0401] In certain embodiments, a composition described herein comprises at least one transgenic BTEX metabolizing enzyme. In certain embodiments, exemplary BTEX metabolizing proteins utilize substrates such as benzene, toluene, ethylbenzene, and/or xylene to produce intermediate metabolic products such as phenol and/or phenol (like).

[0402] In some embodiments, a BTEX metabolizing gene and/or transgene comprises a sequence encoding a peptide sequence that is at least 90%, 91%, 92%, 93%, 94%, 95%, 96%, 97%, 98%, 99%, or 100% identical to any one of SEQ ID NOs: 246, 248, 250, 252, 254, 256, 258, 260, or 262 (or a portion thereof). In some embodiments, a BTEX metabolizing gene and/or transgene comprises a nucleotide sequence that is at least 90%, 91%, 92%, 93%, 94%, 95%, 96%, 97%, 98%, 99%, or 100% identical to any one of SEQ ID NOs: 245, 247, 249, 251, 253, 255, 257, 259, or 261 (or a portion thereof).

-Exemplary Rhodococcus ruber cytochrome P450 monooxygenase
(P450-RR) Nucleic Acid Coding Sequence
SEQ ID NO: 245
ATGAGTGCATCAGTTCCGGCGTCGGCGTGTCCCGTCGATCACGCGGCCCTGGCCGGCGGCTGTC
CGGTGTCGACGAACGCCGCGGCGTTCGATCCGTTCGGGCCCGCGTACCAGGCCGATCCGGCCGA
GTCGCTGCGCTGGTCCCGCGACGAGGAGCCGGTGTTCTACAGCCCCGAACTCGGCTACTGGGTG
GTCACCCGCTACGAGGATGTGAAGGCGGTGTTCCGCGACAACCTCGTGTTCTCACCGGCCATCG
CCCTCGAGAAGATCACCCCGGTCTCCGAGGAGGCCACCGCCACCCTCGCCCGCTACGACTACGC
CATGGCCCGGACCCTCGTGAACGAGGACGAGCCCGCCCACATGCCGCGCCGCCGCGCACTCATG
GACCCGTTCACCCCGAAGGAACTGGCGCACCACGAGGCGATGGTGCGACGGCTCACGCGCGAAT
ACGTCGACCGCTTCGTCGAATCCGGCAAGGCCGACCTGGTGGACGAGATGCTGTGGGAGGTACC
GCTCACCGTCGCCCTGCACTTCCTCGGCGTGCCGGAGGAGGACATGGCGACGATGCGCAAGTAC
TCGATCGCCCACACCGTGAACACCTGGGGCCGCCCCGCGCCCGAGGAGCAGGTCGCCGTCGCCG
AGGCGGTCGGCAGGTTCTGGCAGTACGCGGGCACGGTGCTCGAGAAGATGCGCCAGGACCCCTC
GGGGCACGGCTGGATGCCCTACGGGATCCGCATGCAGCAGCAGATGCCGGACGTCGTCACCGAC
TCCTACCTGCACTCGATGATGATGGCCGGCATCGTCGCCGCGCACGAGACCACGGCCAACGCGT
CCGCGAACGCGTTCAAGCTGCTGCTCGAGAACCGCCCGGTGTGGGAGGAGATCTGCGCGGATCC
GTCGCTGATCCCCAACGCCGTCGAGGAGTGCCTGCGCCACTCGGGATCGGTCGCGGCGTGGCGA
CGGGTGGCCACCACCGACACCCGCATCGGCGACGTCGACATCCCCGCCGGCGCAAAGCTGCTCG
TCGTCAACGCCTCCGCCAACCATGACGAGCGGCACTTCGACCGTCCCGACGAGTTCGACATCCG
GCGCCCGAACTCGAGCGACCACCTCACCTTCGGGTACGGCAGCCATCAGTGCATGGGCAAGAAC
CTGGCCCGCATGGAGATGCAGATCTTCCTCGAGGAACTGACCACGCGGCTTCCCCACATGGAAC
TCGTACCCGATCAGGAGTTCACCTACCTGCCGAACACCTCGTTCCGCGGTCCCGATCACGTGTG
GGTGCAGTGGGATCCGCAGGCGAACCCCGAGCGCACCGACCCGGCCGTGCTGCAACGGCAGCAT
CCCGTCACCATCGGCGAGCCCTCCACCCGGTCGGTGTCACGCACCGTCACCGTCGAGCGCCTGG
ACCGGATCGTCGACGACGTGCTGCGCGTCGTCCTACGGGCTCCTGCAGGAAATGCGTTGCCCGC
GTGGACTCCTGGCGCCCACATCGATGTCGACCTCGGTGCGCTGTCGCGGCAGTACTCCCTGTGC
GGTGCGCCCGACGCGCCCACCTACGAGATCGCCGTTCTGCTGGACCCCGAGAGCCGCGGTGGCT
CGCGCTACGTCCACGAACAGCTCCGGGTGGGGGGATCGCTCCGGATTCGCGGGCCCCGGAACCA
CTTCGCGCTCGACCCCGACGCCGAGCACTACGTGTTCGTGGCCGGCGGCATCGGCATCACCCCC
GTCCTGGCCATGGCCGACCACGCCCGCGCCCGGGGGTGGAGCTACGAACTGCACTACTGCGGCC
GGAACCGTTCCGGGATGGCCTATCTCGAGCGGGTCGCCGGGCACGGGGACCGCGCCGCCCTGCA
CGTCTCGGCGGAAGGCACCCGGGTCGACCTCGCCGCCCTCCTCGCGACGCCGGTGTCCGGCACC
CAGATCTACGCGTGCGGGCCCGGACGGCTGCTCGCCGGACTCGAGGACGCGAGCCGGCACTGGC
CCGACGGTGCGCTGCACGTCGAGCACTTCACCTCGTCCCTCACGGCACTCGACCCGGACGTCGA
GCACGCCTTCGACCTCGACCTGCGCGACTCGGGACTCACCGTGCGGGTCGAGCCCACCCAGACC
GTCCTCGACGCGTTGCGCGCCAACAACATCGACGTGCCCAGCGACTGCGAGGAAGGCCTCTGCG
GCTCCTGCGAGGTCACCGTCCTCGAAGGCGAGGTCGACCACCGCGACACCGTGCTCACCAAGGC
CGAGCGGGCGGCGAACCGGCAGATGATGACCTGCTGCTCGCGTGCCTGCGGCGACCGACTGACC
CTCCGACTCTGA
-Exemplary Rhodococcus ruber cytochrome P450 monooxygenase (P450-RR)
Amino Acid Sequence
SEQ ID NO: 246
MSASVPASACPVDHAALAGGCPVSTNAAAFDPFGPAYQADPAESLRWSRDEEPVFYSPELGYWV
VTRYEDVKAVFRDNLVFSPAIALEKITPVSEEATATLARYDYAMARTLVNEDEPAHMPRRRALM
DPFTPKELAHHEAMVRRLTREYVDRFVESGKADLVDEMLWEVPLTVALHFLGVPEEDMATMRKY
SIAHTVNTWGRPAPEEQVAVAEAVGRFWQYAGTVLEKMRQDPSGHGWMPYGIRMQQQMPDVVTD
SYLHSMMMAGIVAAHETTANASANAFKLLLENRPVWEEICADPSLIPNAVEECLRHSGSVAAWR
RVATTDTRIGDVDIPAGAKLLVVNASANHDERHFDRPDEFDIRRPNSSDHLTFGYGSHQCMGKN
LARMEMQIFLEELTTRLPHMELVPDQEFTYLPNTSFRGPDHVWVQWDPQANPERTDPAVLQRQH
PVTIGEPSTRSVSRTVTVERLDRIVDDVLRVVLRAPAGNALPAWTPGAHIDVDLGALSRQYSLC
GAPDAPTYEIAVLLDPESRGGSRYVHEQLRVGGSLRIRGPRNHFALDPDAEHYVFVAGGIGITP
VLAMADHARARGWSYELHYCGRNRSGMAYLERVAGHGDRAALHVSAEGTRVDLAALLATPVSGT
QIYACGPGRLLAGLEDASRHWPDGALHVEHFTSSLTALDPDVEHAFDLDLRDSGLTVRVEPTQT
VLDALRANNIDVPSDCEEGLCGSCEVTVLEGEVDHRDTVLTKAERAANRQMMTCCSRACGDRLT
LRL
-Exemplary Pseudomonas stutzeri Toluene, O-xylene monooxygenase
oxygenase subunit alpha (TouA-P-sp-OX) Nucleic Acid Coding Sequence
SEQ ID NO: 247
ATGTCCATGCTGAAGAGAGAAGATTGGTATGACCTTACAAGGACAACTAACTGGACACCTAAGT
ACGTTACCGAGAATGAACTCTTTCCTGAGGAGATGTCAGGAGCAAGGGGAATTTCAATGGAAGC
CTGGGAAAAGTACGACGAACCATATAAAATTACGTATCCGGAGTACGTATCGATCCAACGGGAG
AAAGATTCTGGAGCTTATAGCATTAAGGCCGCGTTAGAGCGTGATGGATTCGTGGACCGTGCCG
ATCCTGGGTGGGTTTCCACTATGCAACTTCACTTTGGAGCTATAGCCCTCGAAGAATATGCAGC
TTCAACTGCCGAGGCAAGGATGGCCAGATTCGCAAAAGCGCCTGGTAATCGAAACATGGCCACA
TTCGGAATGATGGATGAGAACCGACACGGACAAATTCAGCTTTATTTTCCGTATGCTAACGTTA
AAAGAAGTAGAAAGTGGGATTGGGCACATAAAGCTATTCACACTAATGAATGGGCCGCTATAGC
CGCTAGGAGCTTCTTTGATGATATGATGATGACGAGAGACAGTGTAGCTGTCTCGATCATGCTT
ACTTTCGCATTCGAGACAGGGTTCACGAATATGCAATTCCTTGGCCTTGCAGCGGATGCGGCGG
AAGCAGGAGATCACACATTTGCATCTCTAATTTCGTCCATCCAAACAGATGAATCGAGACATGC
GCAGCAAGGTGGACCAAGCCTTAAGATACTTGTTGAAAACGGAAAGAAGGATGAAGCACAGCAG
ATGGTCGATGTTGCCATCTGGCGTTCCTGGAAACTATTTAGCGTTTTAACAGGACCTATTATGG
ACTACTACACACCTCTTGAGAGTCGAAATCAGTCTTTCAAGGAATTTATGTTAGAATGGATTGT
TGCTCAATTTGAACGTCAATTGCTCGATCTTGGACTTGACAAGCCCTGGTATTGGGATCAATTT
ATGCAAGATCTTGACGAAACTCATCACGGAATGCACCTTGGCGTTTGGTACTGGCGGCCAACGG
TTTGGTGGGACCCAGCGGCGGGAGTTTCTCCTGAGGAGAGGGAGTGGCTTGAAGAAAAGTACCC
AGGTTGGAATGACACCTGGGGACAGTGCTGGGATGTCATCACGGATAATCTCGTTAATGGCAAG
CCTGAGCTAACCGTACCGGAGACATTACCAACCATTTGCAATATGTGCAACTTACCAATCGCTC
ACACTCCAGGAAATAAATGGAATGTCAAGGATTACCAGCTAGAGTACGAAGGCAGATTGTACCA
CTTTGGGAGCGAGGCCGACCGTTGGTGTTTCCAGATCGACCCTGAGCGGTACGAAAACCATACT
AACCTGGTGGACCGATTCTTGAAGGGTGAAATTCAACCGGCAGACCTCGCGGGTGCCCTGATGT
ACATGAGCCTTGAACCAGGAGTTATGGGAGATGATGCGCACGACTATGAATGGGTCAAAGCCTA
TCAGAAGAAAACAAATGCTGCTTGA
-Exemplary Pseudomonas stutzeri Toluene, O-xylene monooxygenase
oxygenase subunit alpha (TouA-P-sp-OX) Amino Acid Sequence
SEQ ID NO: 248
MSMLKREDWYDLTRTTNWTPKYVTENELFPEEMSGARGISMEAWEKYDEPYKITYPEYVSIQRE
KDSGAYSIKAALERDGFVDRADPGWVSTMQLHFGAWALEEYAASTAEARMARFAKAPGNRNMAT
FGMMDENRHGQIQLYFPYANVKRSRKWDWAHKAIHTNEWAAIAARSFFDDMMMTRDSVAVSIML
TFAFETGFTNMQFLGLAADAAEAGDHTFASLISSIQTDESRHAQQGGPSLKILVENGKKDEAQQ
MVDVAIWRSWKLFSVLTGPIMDYYTPLESRNQSFKEFMLEWIVAQFERQLLDLGLDKPWYWDQF
MQDLDETHHGMHLGVWYWRPTVWWDPAAGVSPEEREWLEEKYPGWNDTWGQCWDVITDNLVNGK
PELTVPETLPTICNMCNLPIAHTPGNKWNVKDYQLEYEGRLYHFGSEADRWCFQIDPERYKNHT
NLVDRFLKGEIQPADLAGALMYMSLEPGVMGDDAHDYEWVKAYQKKTNAA
-Exemplary Pseudomonas aeruginosa benzene monooxygenase oxygenase
subunit (BmoA-Pa) Nucleic Acid Coding Sequence
SEQ ID NO: 249
ATGGCTGTATTGAATCGGACGGACTGGTACGACGTCGCCAGAACAACTAATTGGACGCCGAAAT
ATGTCACGGAGGACGAGCTGTTTCCGCCGGAGCTGAGCGGCAGCTTCGATATCCCCATGGAGAA
ATGGGAGGCCTATGACGAGCCCTACAAGCAGACCTATCCCGAATACGTCAAGGTGCAGCGGGAA
AAGGATGCGGGTGTCTACTCGGTCAAGGCGGCCCTCGAGCGCAGCAAGATGTTCGAGAACGCCG
ATCCGGGCTGGCAATCGGTATTGAAATTGCACTTCGGAGCCATCCCCAGCGGCGAATATGCCGC
GTCCACCGCCGAGGCGCGGATGATGCGCTTCTCCAAGGCACCGGGTATGCGCAACATGGCGACG
CTGGGTAGCATGGATGAAATTCGGCACGCGCAACTGCAGCTCTATTTTCCGCACGAGCATGTCT
CGAAGGACCGTCAGTTCGACTGGGCGCACAAGGCATTCGACACCAACGAATGGGCCGCGATCGC
GTCACGCCACTTCTTCGACGACATCATGATGGCGCGCGATGCCATCAGTGTCGGCATCATGCTC
ACCTTCGGGTTCGAGACCGGTTTCACCAACATGCAGTTCCTCGGGCTGGCGGCGGACGCCGCCG
AGGCGGGGGACTTCACCTTCTCCAGCCTGATCTCCAGCATCCAGACCGACGAATCGCGCCACGC
TCAGATCGGCGGGCCTACGCTGCAGATCCTGATCGAAAACGGCAGGAAGGAAGAGGCCCAGAAG
AAGGTGGACATCGCGTTCTGGCGCGCGTGGAGGCTGTTCTCGGTACTGACCGGCCCGATCATGG
ACTACTACACGCCGCTGGAGCACCGCAATCAGTCGTTCAAGGAATTCATGCAGGAGTGGATCGT
CGAGCAGTTCGAGCGTTCCATTCACGATCTGGGGCTGGACAAGCCCTGGTATTGGGACATCTTC
CTGGAGCAACTGGACCAGCAACATCACGGCATGCATCTGGGCGTCTGGTACTGGCGACCCACCG
TCTGGTGGAACCCGACAGCCGGCGTTACGCCCGAAGAGCGCGACTGGCTCGAAGAAAAATACCC
GGGTTGGAACGACACCTGGGGCCACTGTTGGGACGTGATCATCGACAACCTGGTGGAAGGCCGG
ACCGAACTCACCCTGCCGGAAACCCTGCCGATCGTATGCAACATGTGCAACCTCCCGATCAACT
ACACGCCAGGCAACGGCTGGAATGTCCAGGATTATTCGCTCGAATACAACGGACGCCTGTATCA
CTTCGGCTCGGAGCCGGATCGCTGGATCTTCGAGCAGGAACCCGAACGCTATGCGGGTCACATG
ACCCTGGTGGACCGCTTCCTGGCCGGATTGATCCAGCCAATGGACCTGGGTGGCGCCCTGGCCT
ATATGGACCTCGCGCCGGGCGAGAGCGGTGACGATGCACATGGCTATTCCTGGGTCGAGGTCTA
CAAGCAGTTGCGCACGAAAAAAGCGAGTTGA
-Exemplary Pseudomonas aeruginosa benzene monooxygenase oxygenase
subunit (BmoA-Pa) Amino Acid Sequence
SEQ ID NO: 250
MAVLNRTDWYDVARTTNWTPKYVTEDELFPPELSGSFDIPMEKWEAYDEPYKQTYPEYVKVQRE
KDAGVYSVKAALERSKMFENADPGWQSVLKLHFGAIPSGEYAASTAEARMMRFSKAPGMRNMAT
LGSMDEIRHAQLQLYFPHEHVSKDRQFDWAHKAFDTNEWAAIASRHFFDDIMMARDAISVGIML
TFGFETGFTNMQFLGLAADAAEAGDFTFSSLISSIQTDESRHAQIGGPTLQILIENGRKEEAQK
KVDIAFWRAWRLFSVLTGPIMDYYTPLEHRNQSFKEFMQEWIVEQFERSIHDLGLDKPWYWDIF
LEQLDQQHHGMHLGVWYWRPTVWWNPTAGVTPEERDWLEEKYPGWNDTWGHCWDVIIDNLVEGR
TELTLPETLPIVCNMCNLPINYTPGNGWNVQDYSLEYNGRLYHFGSEPDRWIFEQEPERYAGHM
TLVDRFLAGLIQPMDLGGALAYMDLAPGESGDDAHGYSWVEVYKQLRTKKAS
-Exemplary Pseudomonas mendocina Toluene-4-monooxygenase system,
ferredoxin--NAD(+) reductase component (TmoF-Pm) Nucleic Acid Coding
Sequence
SEQ ID NO: 251
ATGTTCAATATTCAATCGGATGATCTCCTGCACCATTTTGAGGCGGATAGTAATGACACTCTAC
TTAGTGCTGCTCTACGTGCTGAATTGGTATTTCCATATGAGTGTAACTCAGGAGGGTGCGGCGC
ATGTAAGATCGAGCTGCTTGAGGGAGAGGTCTCTAACCTATGGCCTGATGCACCAGGATTAGCC
GCCCGTGAACTCCGTAAGAATCGTTTTTTGGCGTGCCAGTGCAAACCATTATCCGACCTCAAAA
TTAAGGTCATTAACCGTGCGGAGGGACGTGCTTCACATCCCCCCAAACGTTTCTCGACTCGAGT
AGTTAGTAAGCGCTTCCTCTCTGACGAGATGTTTGAGCTGCGACTTGAAGCGGAACAGAAAGTG
GTGTTTTCACCAGGGCAATATTTTATGGTTGACGTGCCTGAACTCGGCACCAGAGCATACTCCG
CGGCAAACCCTGTTGATGGAAACACACTAACGCTGATCGTAAAAGCAGTGCCGAATGGGAAGGT
ATCCTGCGCACTCGCAAATGAAACTATTGAAACACTTCAGTTGGATGGTCCTTACGGGCTGTCA
GTATTAAAAACTGCGGATGAAACTCAATCCGTCTTTATCGCTGGGGGGTCAGGTATCGCGCCGA
TGGTGTCGATGGTGAATACGCTGATTGCCCAAGGGTATGAAAAACCGATTACGGTGTTTTACGG
TTCACGGCTAGAAGCTGAACTGGAAGCGGCCGAAACCCTGTTTGGGTGGAAAGAAAATTTAAAA
CTGATTAATGTGTCGTCGAGCGTGGTGGGTAACTCGGAGAAAAAGTATCCGACCGGTTATGTCC
ATGAGATAATTCCTGAATACATGGAGGGGCTGCTAGGTGCCGAGTTCTATCTGTGCGGCCCGCC
GCAGATGATTAACTCCGTCCAGAAGTTGCTTATGATTGAAAATAAAGTACCGTTCGAAGCGATT
CATTTTGATAGGTTCTTTTAA
-Exemplary Pseudomonas mendocina Toluene-4-monooxygenase system,
ferredoxin--NAD(+) reductase component (TmoF-Pm) Amino Acid Sequence
SEQ ID NO: 252
MFNIQSDDLLHHFEADSNDTLLSAALRAELVFPYECNSGGCGACKIELLEGEVSNLWPDAPGLA
ARELRKNRFLACQCKPLSDLKIKVINRAEGRASHPPKRFSTRVVSKRFLSDEMFELRLEAEQKV
VFSPGQYFMVDVPELGTRAYSAANPVDGNTLTLIVKAVPNGKVSCALANETIETLQLDGPYGLS
VLKTADETQSVFIAGGSGIAPMVSMVNTLIAQGYEKPITVFYGSRLEAELEAAETLFGWKENLK
LINVSSSVVGNSEKKYPTGYVHEIIPEYMEGLLGAEFYLCGPPQMINSVQKLLMIENKVPFEAI
HFDRFF
-Exemplary Methylibium petroleiphilum Toluene monooxygenase alpha
subunit (TbuA1-Mp) Nucleic Acid Coding Sequence
SEQ ID NO: 253
ATGGCCCTTCTTGAGAGAATGGATTGGTATGATCTAGCCCGAACCACCAATTGGACACCGACTT
ATGTCTCCGAGGCGGAATTGTTTCCGACCGAAATGTCTGGGGATATGGGAATACCTATGTCTGA
ATGGGAGAAATATGATGAGCCCTACAAGCAGACCTATTCAGAATACGTCAAAATCCAGCGTGAG
AAAGACAGCGGTGCCTACTCTGTGAAGGGTGCCCTTGAAAGAAGCAAAATGTTGGAAAACGCTG
ACCCTGGCTGGATCTCCGTTATCAAAGCACACTATGGAGCAATCGCCAGGGCTGAATACGCGGC
AGCTTCTGCTGAGTCTCGTATGGCCAGGTTCGCCAAAGCACCAGGGCAACGTAACATGGCAACA
ATGGGTATGTTAGACGAGATCAGACATGGCCAGATCCAATTGTTCTTCCCACATGAGCATGTAT
CAAAAGACAGACAATTTGACTGGGCTTTTAAAGCCTACGACACGAATGAGTGGGGAGCAATCGC
TGCTCGTCATATGTTTGATGACATGATGAACACACGTAGCGCTGTGGCTATCGGCCTCATGTTA
ACATTCGCATTCGAGACTGGCTTCACGAACATGCAATTTCTGGGACTGGCAGCAGATGCAGCTG
AAGCAGGTGACTGGACGTTTGCTAGTATGATCTCAAGTGTACAGACTGACGAGTCACGACATGC
TCAGATAGGTGGACCCCTCGTGCCAATCCTGATCGCTAACGGAAAGAAGGCAGAGGCACAGCGT
ATGATTGACGTAGCCTTTTGGCGTAGCTGGAAATTGTTCACAGTTTTAACGGGTCCGATGATGG
ACTATTACACACCTCTCGCTCATCGTAAGCAGTCATTTAAGGAATTTATGCAAGAATTTATCGT
AACTCAATTCGAGCGATCTATATTGGATCTTGGGTTGGAAAGACCCTGGTACTGGGATCAATTC
CTTGCAGAACTAGACTATCAGCACCACGGGATGCACTTAGGTGTGTGGTTTTGGCGTCCTACAG
TTTGGTGGAATCCTGCGGCAGGAGTCACGCCTGAAGAGAGAGCATGGTTAGAAGAAAAGTACCC
AGGTTGGAACGATACTTGGGGCAAATCATGGGACGTTATTGTGGATAATTTATTAAAAGACAAA
CGAGAGCTGACCTATCCGGAGACATTGCCGGTAGTCTGTAATATGTGCAACCTTCCCATCAATG
CTACACCTGGGGACCCTTGGAAAGTTCGTGACCACTCCCTGGAGAGGAAATCGAGATGGTACCA
CTTCTGTTCCGAAGGCTGTAAGTGGTGCTTCGAGCAAGAGCCTGAAAGATACGAGGGCCACCTT
TCTCTTATCGACAGGTTTCTTGCAGGGTTGATCCAGCCAATGGACCTAGGAGGAGGACTCAAAT
ATATGGGATTAGCGCCTGGAGAGATAGGTGACGACGCTCACGGATATGCCTGGTTGGACGCATA
TAGGCAGGTGCCAAAGGCAGCAGCATAA
-Exemplary Methylibium petroleiphilum Toluene monooxygenase alpha
subunit (TbuA1-Mp) Amino Acid Sequence
SEQ ID NO: 254
MALLERMDWYDLARTTNWTPTYVSEAELFPTEMSGDMGIPMSEWEKYDEPYKQTYSEYVKIQRE
KDSGAYSVKGALERSKMLENADPGWISVIKAHYGAIARAEYAAASAESRMARFAKAPGQRNMAT
MGMLDEIRHGQIQLFFPHEHVSKDRQFDWAFKAYDTNEWGAIAARHMFDDMMNTRSAVAIGLML
TFAFETGFTNMQFLGLAADAAEAGDWTFASMISSVQTDESRHAQIGGPLVPILIANGKKAEAQR
MIDVAFWRSWKLFTVLTGPMMDYYTPLAHRKQSFKEFMQEFIVTQFERSILDLGLERPWYWDQF
LAELDYQHHGMHLGVWFWRPTVWWNPAAGVTPEERAWLEEKYPGWNDTWGKSWDVIVDNLLKDK
RELTYPETLPVVCNMCNLPINATPGDPWKVRDHSLERKSRWYHFCSEGCKWCFEQEPERYEGHL
SLIDRFLAGLIQPMDLGGGLKYMGLAPGEIGDDAHGYAWLDAYRQVPKAAA
-Exemplary Pseudomonas putida aromatic ring-hydroxylating dioxygenase
subunit alpha (todC1(bnzA)-Pp) Nucleic Acid Coding Sequence
SEQ ID NO: 255
ATGAACCAAACTGACACCTCACCCATCCGACTACGACGGTCGTGGAATACCAGTGAGATTGAGG
CATTGTTTGATGAGCACGCCGGTAGGATTGATCCTAGAATTTATACGGATGAGGACCTTTATCA
GCTTGAGCTTGAGAGAGTCTTTGCTAGGTCATGGTTGCTCTTGGGGCATGAAACCCAAATTCGG
AAACCAGGTGACTACATTACAACCTACATGGGGGAGGACCCAGTGGTTGTGGTTAGACAAAAAG
ATGCGAGTATAGCGGTATTTTTAAACCAATGCAGGCATAGAGGGATGAGAATTTGTAGAGCCGA
TGCAGGCAACGCTAAGGCTTTTACATGCAGTTATCATGGGGGGCATACGATACCGCAGGCAAC
TTGGTCAATGTACCTTATGAGGCGGAAAGCTTTGCTTGCTTGAATAAAAAGGAGTGGTCCCCCT
TAAAAGCCCGCGTGGAAACCTACAAGGGACTGATATTTGCCAATTGGGATGAAAACGCCGTTGA
CCTCGATACCTATTTGGGTGAAGCAAAGTTTTATATGGACCATATGTTGGATCGGACAGAAGCA
GGGACTGAAGCAATTCCCGGGGTACAAAAATGGGTGATTCCCTGTAATTGGAAATTTGCCGCAG
AACAATTTTGTTCTGATATGTATCACGCTGGCACCACTTCACATCTCAGTGGGATCCTTGCTGG
CCTTCCAGAGGACTTAGAGATGGCTGACTTGGCACCACCGACTGTTGGGAAACAATATCGCGCA
TCATGGGGTGGCCACGGTAGTGGTTTTTATGTTGGAGATCCCAATTTGATGCTGGCCATAATGG
GTCCAAAAGTTACATCATATTGGACTGAAGGGCCCGCCTCCGAGAAGGCCGCTGAGCGGTTAGG
TTCGGTAGAGCGTGGGTCCAAATTGATGGTAGAACACATGACTGTTTTCCCCACCTGTAGTTTT
CTGCCCGGAATAAATACAGTGAGGACTTGGCATCCTCGGGGACCAAACGAGGTGGAAGTATGGG
CGTTTACTGTGGTAGATGCGGACGCTCCGGACGATATAAAAGAAGAGTTTCGTAGACAAACCCT
CAGAACTTTCTCTGCTGGCGGTGTATTTGAGCAAGATGACGGGGAAAATTGGGTGGAGATTCAA
CACATTCTTCGGGGTCACAAGGCTCGCTCTCGTCCCTTTAACGCAGAGATGAGCATGGATCAAA
CTGTGGATAATGATCCTGTTTATCCAGGGCGAATTTCTAATAACGTGTACAGTGAGGAAGCGGC
ACGAGGATTATACGCTCATTGGCTTAGGATGATGACTTCTCCGGACTGGGATGCTTTGAAAGCT
ACTAGGTGA
-Exemplary Pseudomonas putida aromatic ring-hydroxylating
dioxygenase subunit alpha (todC1(bnzA)-Pp) Amino Acid Sequence
SEQ ID NO: 256
MNQTDTSPIRLRRSWNTSEIEALFDEHAGRIDPRIYTDEDLYQLELERVFARSWLLLGHETQIR
KPGDYITTYMGEDPVVVVRQKDASIAVFLNQCRHRGMRICRADAGNAKAFTCSYHGWAYDTAGN
LVNVPYEAESFACLNKKEWSPLKARVETYKGLIFANWDENAVDLDTYLGEAKFYMDHMLDRTEA
GTEAIPGVQKWVIPCNWKFAAEQFCSDMYHAGTTSHLSGILAGLPEDLEMADLAPPTVGKQYRA
SWGGHGSGFYVGDPNLMLAIMGPKVTSYWTEGPASEKAAERLGSVERGSKLMVEHMTVFPTCSF
LPGINTVRTWHPRGPNEVEVWAFTVVDADAPDDIKEEFRRQTLRTFSAGGVFEQDDGENWVEIQ
HILRGHKARSRPFNAEMSMDQTVDNDPVYPGRISNNVYSEEAARGLYAHWLRMMTSPDWDALKA
TR
-Exemplary Pseudoxanthomonas sp. BD-a59 hydroxylase alpha subunit
(tmoA-P-sp-Bda59) Nucleic Acid Coding Sequence
SEQ ID NO: 257
ATGCAATTCCTAGGCCTAGCTGCTGACGCCGCCGAAGCAGGAGATCACACATTTGCTTCATTGA
TCAGCTCAATACAGACTGACGAATCTAGGCATGCTCAGATCGGTGGACCAGCCTTACAGGTTCT
TATTGCTAACGGCCAAAAGGCCACGGCTCAGAAGAAGGTTGATATTGCATTTTGGAGAGCATGG
AAACTATTTGCCGTGTTAACGGGACCAATGATGGACTACTATACTCCACTTGAACACCGAAAAC
AGAGTTTCAAGGAGTTTATGGAAGAGTGGATCGTAGCTCAGTTCGAACGTGCTTTGACTGATTT
AGGTCTTGATTTGCCCTGGTATTGGGACCACTTCCTAGAAGAACTTAGCCAGACACACCACGGA
ATGCACCTGGGAGTATGGTTTTGGCGTCCAACTGTCTGGTGGAACCCAGCCGCTGGGGTAACAC
CAACGGAAAGAGATTAA
-Exemplary Pseudoxanthomonas sp. BD-a59 hydroxylase alpha subunit
(tmoA-P-sp-BDa59) Amino Acid Sequence
SEQ ID NO: 258
MQFLGLAADAAEAGDHTFASLISSIQTDESRHAQIGGPALQVLIANGQKATAQKKVDIAFWRAW
KLFAVLTGPMMDYYTPLEHRKQSFKEFMEEWIVAQFERALTDLGLDLPWYWDHFLEELSQTHHG
MHLGVWFWRPTVWWNPAAGVTPTERD
-Exemplary Pseudomonas mendocina hydroxylase alpha subunit (tmoA-Pm)
Nucleic Acid Coding Sequence
SEQ ID NO: 259
ATGGCAATGACCCTCGGAAAGACTGGTACGAATTGACCAGAGCTACAAATTGGACGCCTTCATA
CGTTACTGAGGAACAGCTTTTCCCCGAGAGAATGTCCGGGCACATGGGAATACCACTTGAGAAA
TGGGAATCCTACGACGAACCATATAAGACATCATATCCAGAGTATGTCTCTATTCAGCGAGAGA
AGGACGCTGGCGCTTACTCTGTTAAGGCGGCGCTCGAACGTGCTAAGATCTATGAAAACTCTGA
CCCTGGCTGGATAAGCACATTGAAGTCACACTACGGAGCAATAGCGGTTGGCGAATACGCGGCT
GTAACTGGTGAGGGACGAATGGCTCGGTTTTCGAAAGCCCCTGGGAATCGTAACATGGCTACTT
TTGGGATGATGGATGAGCTGAGGCACGGACAGTTACAACTGTTCTTTCCACATGAGTATTGCAA
GAAGGACAGACAATTCGATTGGGCATGGAGAGCATATCATAGCAATGAATGGGCCGCCATAGCT
GCTAAACACTTCTTCGACGACATCATCACCGGCAGGGACGCAATCTCAGTCGCGATCATGTTAA
CATTCTCATTCGAGACGGGTTTTACTAACATGCAGTTCCTAGGATTGGCCGCAGACGCAGCAGA
AGCAGGCGATTATACGTTTGCCAATCTTATATCTTCTATCCAGACCGATGAATCCAGACACGCA
CAGCAAGGTGGCCCGGCCCTTCAATTGCTCATAGAAAACGGAAAACGAGAAGAGGCGCAGAAGA
AGGTCGATATGGCTATCTGGAGAGCATGGAGACTTTTCGCAGTCCTGACAGGACCTGTTATGGA
CTACTATACACCATTAGAAGATAGATCTCAATCATTCAAAGAATTTATGTACGAATGGATTATT
GGGCAGTTCGAGCGTTCTCTAATAGACCTTGGTTTGGATAAACCATGGTACTGGGACCTTTTCC
TAAAAGATATTGACGAATTACACCACTCTTATCACATGGGTGTGTGGTATTGGCGAACGACAGC
ATGGTGGAACCCTGCTGCTGGAGTTACTCCCGAGGAGAGAGACTGGCTTGAAGAGAAGTATCCA
GGATGGAACAAGAGATGGGGACGTTGTTGGGACGTAATTACCGAAAATGTATTGAATGACCGGA
TGGATTTGGTCAGCCCGGAAACTTTGCCGTCAGTGTGCAATATGTCCCAGATCCCTCTGGTTGG
TGTCCCGGGCGATGACTGGAACATTGAGGTTTTCAGCCTAGAGCACAACGGAAGGTTGTACCAC
TTTGGGTCCGAAGTGGACAGATGGGTTTTCCAACAGGACCCGGTTCAATACCAAAACCACATGA
ACATCGTAGATCGGTTTCTCGCCGGACAGATCCAACCTATGACGCTTGAAGGGGCACTTAAGTA
CATGGGTTTTCAATCCATTGAGGAGATGGGCAAAGACGCACACGACTTCGCATGGGCCGACAAA
TGCAAACCTGCTATGAAGAAGAGCGCCTAG
-Exemplary Pseudomonas mendocina hydroxylase alpha subunit (tmoA-Pm)
Amino Acid Sequence
SEQ ID NO: 260
MAMHPRKDWYELTRATNWTPSYVTEEQLFPERMSGHMGIPLEKWESYDEPYKTSYPEYVSIQRE
KDAGAYSVKAALERAKIYENSDPGWISTLKSHYGAIAVGEYAAVTGEGRMARFSKAPGNRNMAT
FGMMDELRHGQLQLFFPHEYCKKDRQFDWAWRAYHSNEWAAIAAKHFFDDIITGRDAISVAIML
TFSFETGFTNMQFLGLAADAAEAGDYTFANLISSIQTDESRHAQQGGPALQLLIENGKREEAQK
KVDMAIWRAWRLFAVLTGPVMDYYTPLEDRSQSFKEFMYEWIIGQFERSLIDLGLDKPWYWDLF
LKDIDELHHSYHMGVWYWRITAWWNPAAGVTPEERDWLEEKYPGWNKRWGRCWDVITENVLNDR
MDLVSPETLPSVCNMSQIPLVGVPGDDWNIEVESLEHNGRLYHFGSEVDRWVFQQDPVQYQNHM
NIVDRFLAGQIQPMTLEGALKYMGFQSIEEMGKDAHDFAWADKCKPAMKKSA
-Exemplary Pinus taeda Eng-Phenylalanine Hydroxylase (PHOH-Pt)
Nucleic Acid Coding Sequence
SEQ ID NO: 261
ATGGCGTTTCCACTCCAGAAAACTTTTCTCTGCTCAAATGGCCAATCATTCCCCTGCTCAAATG
GCCGATCGACATCTACACTGCTAGCATCCGACCTCAAGTTTCAACGACTTAATAAGCCTTTCAT
CCTCAGAGTCGGAAGCATGCAAATCAGAAATAGTCCTAAAGAACACCCAAGAGTGAGCAGCGCA
GCTGTGTTGCCTCCAGTACCAAGATCTATTCACGACATACCTAATGGTGATCATATTCTTGGGT
TTGGGGCAAATTTAGCAGAAGATCATCCAGGATACCATGATGAAGAATACAAGAGAAGGCGGTC
ATGTATTGCTGACCTGGCCAAGAAACACAAAATAGGAGAACCCATTCCTGAGATCAACTATACT
ACTGAAGAAGCTCATGTTTGGGCAGAAGTCCTTACAAAGCTTAGTGAATTGTACCCCAGTCATG
CTTGCAAAGAGTATTTGGAATCATTTCCACTTTTCAACTTTTCTCCTAACAAAATTCCTCAACT
AGAAGAGCTTTCACAGATTTTGCAGCATTACACTGGTTGGAAAATAAGACCTGTTGCAGGGCTG
TTGCACCCACGTCAATTTTTGAATGGACTAGCTTTCAAAACATTCCATTCAACACAGTATATTC
GTCACACTAGCAATCCAATGTACACTCCTGAACCTGACATTTGCCATGAGATACTTGGTCACAT
GCCAATGCTTGTACACCCTGAGTTTGCTGATCTTGCTCAGGTTATTGGCTTAGCATCACTGGGA
GCATCAGATAAAGAAATTTGGCATCTTACTAAGCTATATTGGTATACAGTTGAGTTTGGAACAA
TTGAAGAAAATAAGGAAGTTAAGGCATTTGGAGCTGGCATACTGTCAAGTTTTGGTGAGCTTCA
ACACATGAAGTCTAGCAAACCAACATTTCAGAAACTTGATCCATTCGCTCAGCTACCCAAGATG
AGTTACAAGGATGGATTTCAAAATATGTACTTCTTATGTCAAAGTTTTTCAGACACTACAGAAA
AGCTTCGCTCCTATGCAAGAACTATTCACTCTGGTAATTAA
-Exemplary Pinus taeda Eng-Phenylalanine Hydroxylase (PHOH-Pt)
Amino Acid Sequence
SEQ ID NO: 262
MAFPLQKTFLCSNGQSFPCSNGRSTSTLLASDLKFQRLNKPFILRVGSMQIRNSPKEHPRVSSA
AVLPPVPRSIHDIPNGDHILGFGANLAEDHPGYHDEEYKRRRSCIADLAKKHKIGEPIPEINYT
TEEAHVWAEVLTKLSELYPSHACKEYLESFPLFNFSPNKIPQLEELSQILQHYTGWKIRPVAGL
LHPRQFLNGLAFKTFHSTQYIRHTSNPMYTPEPDICHEILGHMPMLVHPEFADLAQVIGLASLG
ASDKEIWHLTKLYWYTVEFGTIEENKEVKAFGAGILSSFGELQHMKSSKPTFQKLDPFAQLPKM
SYKDGFQNMYFLCQSFSDTTEKLRSYARTIHSGN

Phenol and/or Phenol (like) Metabolizing Enzymes

[0403] In certain embodiments, a composition described herein comprises at least one transgenic phenol and/or phenol (like) metabolizing enzyme. In certain embodiments, exemplary phenol and/or phenol (like) metabolizing proteins utilize substrates such as phenol and/or phenol (like) to produce intermediate metabolic products such as catechol and/or catechol (like).

[0404] In some embodiments, a phenol and/or phenol (like) metabolizing enzyme gene and/or transgene comprises a sequence encoding a peptide sequence that is at least 90%, 91%, 92%, 93%, 94%, 95%, 96%, 97%, 98%, 99%, or 100% identical to any one of SEQ ID NOs: 264, 266, or 268 (or a portion thereof). In some embodiments, a phenol and/or phenol (like) metabolizing enzyme gene and/or transgene comprises a nucleotide sequence that is at least 90%, 91%, 92%, 93%, 94%, 95%, 96%, 97%, 98%, 99%, or 100% identical to any one of SEQ ID NOs: 263, 265, or 267 (or a portion thereof).

-Exemplary Pseudomonas sp. OX1 phenol hydroxylase component phP
(PH-PS-OX1) Nucleic Acid Coding Sequence
SEQ ID NO: 263
ATGAGTTACACCGTCACTATTGAGCCGATCGGCGAGCAGATTGAGGTAGAGGATGGCCAGACTA
TCCTCGCCGCCGCCCTGCGCCAGGGTGTCTGGCTGCCCTTTGCCTGCGGCCACGGCACCTGTGC
TACCTGTAAGGTTCAGGTGCTTGAAGGTGATGTCGAGATCGGAAACGCCTCGCCCTTTGCGCTG
ATGGATATCGAACGTGACGAGGGCAAGGTTCTGGCCTGCTGCGCCACGGTTGAGAGCGACGTCA
CCATTGAGGTGGACATCGATGTGGATCCGGATTTTGAGGGCTACCCGGTGGAGGACTATGCCGC
CATAGCGACCGATATCGTCGAACTCTCTCCGACCATCAAGGGCATTCACCTGAAACTGGACCGG
CCGATGACATTCCAGGCCGGCCAGTACATCAATATCGAACTGCCGGGTGTTGAAGGCGCGAGGG
CCTTCTCCCTGGCCAACCCGCCCAGCAAAGCAGACGAAGTGGAGCTGCATGTGCGCCTCGTTGA
GGGCGGTGCTGCCACCACCTACATCCACGAACAACTGAAAACGGGTGATGCGCTGAACCTTTCA
GGCCCTTACGGCCAGTTCTTCGTGCGTAGTTCCCAACCCGGCGATCTGATTTTCATCGCCGGCG
GATCCGGATTGTCCAGTCCCCAGTCGATGATCCTTGATCTGCTTGAGCAGAACGATGAGCGCAA
GATCGTTCTGTTCCAGGGTGCCCGAAACCTGGCAGAGCTTTACAACCGGGAGCTGTTTGAGGCT
CTGGATCGCGACCACGACAATTTCACCTACGTACCGGCGCTTAGCCAAGCCGACGAAGACCCTG
ACTGGAAGGGCTTCCGAGGCTATGTCCATGAGGCGGCCAACGCCCATTTCGATGGCCGGTTTGC
CGGTAACAAGGCATACCTGTGCGGCCCGCCTCCAATGATCGATGCGGCTATCACGGCATTGATG
CAGGGGCGGCTGTTCGAGCGTGACATCTTCATGGAGAAATTCCTGACAGCGGCGGACGGAGCTG
AAGACACCCAGCGTTCGGCCCTGTTCAAGAAGATATAG
-Exemplary Pseudomonas sp. OX1 phenol hydroxylase component phP
(PH-PS-OX1) Amino Acid Sequence
SEQ ID NO: 264
MSYTVTIEPIGEQIEVEDGQTILAAALRQGVWLPFACGHGTCATCKVQVLEGDVEIGNASPFAL
MDIERDEGKVLACCATVESDVTIEVDIDVDPDFEGYPVEDYAAIATDIVELSPTIKGIHLKLDR
PMTFQAGQYINIELPGVEGARAFSLANPPSKADEVELHVRLVEGGAATTYIHEQLKTGDALNLS
GPYGQFFVRSSQPGDLIFIAGGSGLSSPQSMILDLLEQNDERKIVLFQGARNLAELYNRELFEA
LDRDHDNFTYVPALSQADEDPDWKGFRGYVHEAANAHFDGRFAGNKAYLCGPPPMIDAAITALM
QGRLFERDIFMEKFLTAADGAEDTQRSALFKKI
-Exemplary Cutaneotrichosporon cutaneum Phenol hydroxylase (PH-CC)
Nucleic Acid Coding Sequence
SEQ ID NO: 265
ATGACCAAGTACAGCGAATCCTACTGCGACGTCCTCATCGTTGGTGCCGGCCCCGCCGGTTTGA
TGGCCGCCCGCGTCCTCTCAGAGTACGTGCGCCAGAAGCCCGACCTCAAGGTCCGCATCATCGA
CAAGCGCTCGACCAAGGTCTACAATGGCCAGGCAGACGGTCTCCAGTGCCGTACCCTCGAGTCT
CTAAAGAACCTTGGTCTTGCCGACAAGATCCTCTCGGAGGCAAACGACATGTCGACGATCGCGC
TCTACAACCCCGACGAGAATGGACACATTCGTCGCACCGACCGCATCCCAGACACCCTCCCCGG
CATCTCGCGCTACCACCAGGTCGTGCTCCACCAAGGCCGGATTGAGAGGCACATCCTCGACTCG
ATTGCGGAGATTTCGGACACCCGTATCAAGGTCGAGCGGCCGCTCATCCCCGAGAAGATGGAGA
TCGACAGCTCCAAGGCTGAGGACCCCGAGGCCTACCCCGTCACGATGACTCTCCGCTACATGAG
TGACCACGAGTCGACTCCTCTACAGTTCGGGCACAAGACCGAGAACAGCCTCTTCCACTCCAAC
CTCCAGACCCAGGAGGAGGAGGATGCCAACTACCGCCTCCCCGAGGGCAAGGAGGCGGGCGAGA
TCGAGACCGTTCACTGCAAGTACGTTATCGGCTGTGACGGTGGCCACTCATGGGTCCGCCGCAC
TCTCGGCTTCGAGATGATTGGCGAGCAGACCGACTACATCTGGGGTGTTCTTGACGCTGTCCCG
GCCTCCAACTTCCCCGACATTCGCTCGCCGTGCGCCATCCACTCTGCCGAGTCTGGCTCGATCA
TGATCATCCCGCGCGAGAACAATCTCGTCCGCTTCTACGTTCAGCTCCAGGCCCGCGCTGAGAA
GGGCGGGCGCGTCGACCGCACCAAGTTTACTCCCGAGGTCGTCATTGCCAACGCAAAGAAAATC
TTCCACCCCTACACCTTTGATGTCCAGCAGCTCGACTGGTTTACTGCCTATCACATTGGCCAGC
GTGTTACTGAGAAGTTCTCGAAGGACGAGCGCGTGTTCATCGCCGGTGACGCTTGCCACACCCA
TTCGCCCAAGGCCGGCCAGGGCATGAACACGTCAATGATGGACACCTACAACCTCGGCTGGAAG
CTCGGTCTCGTACTCACTGGCCGTGCCAAGCGCGACATCCTCAAGACGTACGAGGAGGAGCGCC
ACGCATTCGCACAGGCCCTCATCGACTTTGACCACCAGTTCTCGCGCCTCTTCTCGGGCCGCCC
GGCTAAGGACGTGGCCGATGAGATGGGCGTCTCGATGGACGTGTTCAAGGAGGCATTCGTCAAG
GGCAACGAGTTCGCCTCGGGCACCGCTATCAACTACGACGAGAACCTCGTGACCGACAAGAAGA
GTTCCAAGCAGGAGCTTGCCAAGAACTGCGTTGTCGGAACCCGCTTCAAGTCGCAACCCGTTGT
CCGCCACTCTGAGGGCCTCTGGATGCACTTTGGCGACCGCCTCGTCACCGACGGCCGATTCCGC
ATCATTGTCTTCGCCGGCAAGGCTACCGATGCCACCCAGATGTCCCGCATTAAGAAGTTTTCCG
CCTACCTCGACTCGGAGAACTCGGTCATCTCGCTCTACACCCCCAAGGTCTCTGACCGCAACTC
GCGCATCGACGTCATCACCATTCACTCCTGCCACCGCGATGACATCGAGATGCACGACTTCCCC
GCACCGGCTCTCCACCCCAAGTGGCAATATGACTTCATCTACGCCGACTGCGACTCATGGCACC
ACCCCCACCCCAAGTCCTACCAGGCCTGGGGCGTCGACGAGACCAAGGGTGCCGTCGTGGTCGT
CCGCCCAGACGGCTACACCTCGCTCGTGACCGACCTCGAGGGCACCGCCGAGATTGACCGCTAC
TTCAGCGGTATCCTTGTCGAGCCCAAGGAGAAGTCCGGAGCCCAGACCGAGGCCGACTGGACCA
AGTCAACTGCATAA
-Exemplary Cutaneotrichosporon cutaneum Phenol hydroxylase (PH-CC)
Amino Acid Sequence
SEQ ID NO: 266
MTKYSESYCDVLIVGAGPAGLMAARVLSEYVRQKPDLKVRIIDKRSTKVYNGQADGLQCRTLES
LKNLGLADKILSEANDMSTIALYNPDENGHIRRTDRIPDTLPGISRYHQVVLHQGRIERHILDS
IAEISDTRIKVERPLIPEKMEIDSSKAEDPEAYPVTMTLRYMSDHESTPLQFGHKTENSLFHSN
LQTQEEEDANYRLPEGKEAGEIETVHCKYVIGCDGGHSWVRRTLGFEMIGEQTDYIWGVLDAVP
ASNFPDIRSPCAIHSAESGSIMIIPRENNLVRFYVQLQARAEKGGRVDRTKFTPEVVIANAKKI
FHPYTFDVQQLDWFTAYHIGQRVTEKFSKDERVFIAGDACHTHSPKAGQGMNTSMMDTYNLGWK
LGLVLTGRAKRDILKTYEEERHAFAQALIDFDHQFSRLFSGRPAKDVADEMGVSMDVFKEAFVK
GNEFASGTAINYDENLVTDKKSSKQELAKNCVVGTRFKSQPVVRHSEGLWMHFGDRLVTDGRFR
IIVFAGKATDATQMSRIKKFSAYLDSENSVISLYTPKVSDRNSRIDVITIHSCHRDDIEMHDFP
APALHPKWQYDFIYADCDSWHHPHPKSYQAWGVDETKGAVVVVRPDGYTSLVTDLEGTAEIDRY
FSGILVEPKEKSGAQTEADWTKSTA
-Exemplary Asparagus officinalis uncharacterized protein
A4U43_C04F5180 (PH-AO) Nucleic Acid Coding Sequence
SEQ ID NO: 267
ATGAACACGGGCATTCAGGATGCCCATAATTTAGCCTGGAAAATAAGCTGTTTGTTGAAAGATG
CTGCTTCGCCTTCCCTTATAAAAACTTATGAGTCAGAGCGTAGACCAATTGCCATCTCCAACAC
TGCATTAAGTGTTAATAACTTCAAAGCAGCTATGTCAGTTCCTGCTGCACTTGGTATTGATCCA
ACTGTTGCAAATACAGTTCATCAGGTAATAAACAGTAGTTTTGGATCCATTCTTCCTTCTACTT
TCCAAAAAGCTGCCCTGGAAGGAATTTTTTCCATTGGCCGGGCACAACTCTCGGACTTTGTTCT
GAATGAAAACAATCCACTTGGTTCTTCAAGGCTTGCTAGGCTGAGGGCTATATTTGATGAGGGG
AAGATTGGTTTCAGGTACCTTAAGGGAGCTCTGGTAGCTGACAGTGACAACGAAACACAAGAAA
CGGTAGAAACTGCTGCTACCTATAAGAGAGGGTCAAGGGACTATGTTCCCTCCGGTAAACCTGG
ATCGAGATTGCCACATATGCAACTGAGGATGTTGAATGCATCAGAAAATGAGGATTCTATCTCA
ACCTTGGATCTAATATCTGTAGAAAAACTAGAATTCCTTCTGATTATTGCACCGTTGAAAGACT
CCTACGATGTTGCTCGTGTGGCCTTTAAGGTAGCAGAAACACTCAGAGTCTCACTTAAGGTTTG
TGTGATCTGGGCTCAAGGTTCGGCTCCTGCTGATGCTTCTGGAAGTGGACAGGAAGTGGAGCCC
TGGAAAAATTATGTAGATGTTGAAGAAATTCAGAGGTCAAACTCAAAGTCATGGTGGGAGGTGT
GTCAAATGTCGAACAGGGGGGTCATTTTGGTCAGACCTGATGATCATATTGCATGGAGTACAGA
GATTGATTCTGTTGAGAATATTGTGCAACAAGTGGAAAGAGTCTTCTTCCTAATATTAGGGGCG
GTGAGGACCTCTTCGTAG
-Exemplary Asparagus officinalis uncharacterized protein
A4U43_C04F5180 (PH-AO) Amino Acid Sequence
SEQ ID NO: 268
MNTGIQDAHNLAWKISCLLKDAASPSLIKTYESERRPIAISNTALSVNNFKAAMSVPAALGIDP
TVANTVHQVINSSFGSILPSTFQKAALEGIFSIGRAQLSDFVLNENNPLGSSRLARLRAIFDEG
KIGFRYLKGALVADSDNETQETVETAATYKRGSRDYVPSGKPGSRLPHMQLRMLNASENEDSIS
TLDLISVEKLEFLLIIAPLKDSYDVARVAFKVAETLRVSLKVCVIWAQGSAPADASGSGQEVEP
WKNYVDVEEIQRSNSKSWWEVCQMSNRGVILVRPDDHIAWSTEIDSVENIVQQVERVFFLILGA
VRTSS

Catechol and/or Catechol (Like) Metabolizing Enzymes

[0405] In certain embodiments, a composition described herein comprises at least one transgenic catechol and/or catechol (like) metabolizing enzyme. In certain embodiments, exemplary catechol and/or catechol (like) metabolizing proteins utilize substrates such as catechol and/or catechol (like) to produce metabolic products such as 2-hydroxymuconicsemi aldehyde, 2-hydroxymuconicsemi aldehyde (like), and/or cis-Muconate.

[0406] In some embodiments, catechol and/or catechol (like) metabolizing enzyme gene and/or transgene comprises a sequence encoding a peptide sequence that is at least 90%, 91%, 92%, 93%, 94%, 95%, 96%, 97%, 98%, 99%, or 100% identical to any one of SEQ ID NOs: 270, 272, 274, 276, 278, 280, or 282 (or a portion thereof). In some embodiments, a catechol and/or catechol (like) metabolizing enzyme gene and/or transgene comprises a nucleotide sequence that is at least 90%, 91%, 92%, 93%, 94%, 95%, 96%, 97%, 98%, 99%, or 100% identical to any one of SEQ ID NOs: 269, 271, 273, 275, 277, 279, or 281 (or a portion thereof).

-Exemplary Pseudomonas sp. JR1 3-isopropylcatechol-2,3-dioxygenase
(Ipbc-P-sp-JR1) Nucleic Acid Coding Sequence
SEQ ID NO: 269
ATGGGCATTAAAAGCTTGGGTTACATGGGGTTCTCTGTAAGTGATGTACCGGCATGGCGCTCGT
TCCTCACCGAAAAAGTGGGTTTGATGGAGGTTGTTGGCTCCGATGAGAATGCCTTATACCGCAT
GGACTCACGCAGTTGGCGGATTGCCGTGGAAAGGGGGGAGGCTGACGACCTAGCATTCGCCGGT
TATGAAGTTGCCAATCCGCTGGCCTTGAAGCTGATTACGGAGCGGCTACGGGAGGCTGGTGTTC
AGGTGAGGACCGGCGACACTGAACTGGCAGAAAAGCGTGGCGTGATGGAACTGGTCTCTTTTGA
AGATCCATTTGGAATGCCGCTGGAAATTTACTACGGGGCTACCGAACTATTCGAGCAGCCTTTC
GTTTCTGGCACTTGTGTCACTGGGTTCCTGACTGGTGACCAAGGAGCTGGGCATTATTTTTATG
CTGTCCCGGATATTGAAGAAGGACTGGCTTTCTATACTGGCATACTGGGTTTCCAGATGTCCGA
CGTCATTGATATAGCTATGGGTCCGGATATTACAGTGCGGGGATACTTTCTTCATTGCAACGGG
CGCCACCACACAATGGCGATCGCGGAGGCTCCGTTACCCAAGAGAGTTCACCATTTTTTGCTGC
AGGCCTTGACGCTGGATGATGTAGGTCATGCGTACGACCGAATCGATGGATTGGGCGACAAATC
TACCGACTCCAATCTTCGGGTGCCGGCAAATAGTGATATTAGGTCCAGCAGGATCACGGCGACG
ATCGGACGCCATGTCAACGATCACATGATTTCCTTTTACGCTGAGACGCCGTCCGGGTTTGAGC
TTGAGTTTGGTTGGGGCGCGCGCGACGTAGATGACCGGTCTTGGGTGATGACGAGGCACAAGCG
CACGGCCATGTGGGGTCATAAATCTATGCGTAATAAGTAA
-Exemplary Pseudomonas sp. JR1 3-isopropylcatechol-2,3-dioxygenase
(Ipbc-P-sp-JR1)Amino Acid Sequence
SEQ ID NO: 270
MGIKSLGYMGFSVSDVPAWRSFLTEKVGLMEVVGSDENALYRMDSRSWRIAVERGEADDLAFAG
YEVANPLALKLITERLREAGVQVRTGDTELAEKRGVMELVSFEDPFGMPLEIYYGATELFEQPF
VSGTCVTGFLTGDQGAGHYFYAVPDIEEGLAFYTGILGFQMSDVIDIAMGPDITVRGYFLHCNG
RHHTMAIAEAPLPKRVHHFLLQALTLDDVGHAYDRIDGLGDKSTDSNLRVPANSDIRSSRITAT
IGRHVNDHMISFYAETPSGFELEFGWGARDVDDRSWVMTRHKRTAMWGHKSMRNK
-Exemplary Pseudomonas putida YLE2_PSEPU Metapyrocatechase
(xylE-Pp) Nucleic Acid Coding Sequence
SEQ ID NO: 271
ATGAAGAAGGGAGTAATGCGACCAGGCCACGTGCAACTACGAGTGCTCAACCTAGAGGCGGCGC
TTACTCACTACAGGGATCTTCTTGGTCTAATCGAAATGGACCGAGACGAACAAGGAAGAGTCTA
TCTCAAGGCTTGGTCGGAAGTGGACAAGTTTTCAGTGGTCCTTCGTGAAGCTGATCAGCCAGGA
ATGGACTTCATGGGTTTTAAGGTCACCGATGATGCCTGTCTTACTCGTTTAGCAGGCGAACTCC
TCGAATTTGGATGCCAGGTTGAAGAGATCCCCGCGGGAGAGTTAAAAGACTGTGGTAGGAGAGT
ACGATTTCTTGCCCCGTCTGGACATTTCTTTGAGCTTTATGCTGAGAAAGAATATACGGGTAAA
TGGGGCATCGAGGAAGTTAACCCTGAAGCATGGCCTAGGGACCTGAAGGGAATGAGAGCGGTGA
GGTTCGACCACTGCTTGATGTACGGAGATGAGCTTCAAGCCACATACGAGCTATTCACAGAAGT
TTTGGGATTTTACTTGGCTGAGCAAGTTATCGAGGATAATGGCACACGAATATCTCAGTTTCTT
TCCTTGAGTACCAAGGCTCACGACGTTGCATTCATACAGCACGCTGAAAAGGGAAAATTCCATC
ACGTTAGTTTCTTTCTCGAAACTTGGGAAGATGTCCTTCGAGCAGCAGACTTGATTTCCATGAC
AGACACTTCAATAGACATAGGCCCGACCAGACATGGCCTAACTCACGGTAAAACGATTTATTTC
TTTGACCCGTCAGGAAACAGAAATGAAGTATTTTGCGGTGGCGACTATAACTATCCTGACCACA
AGCCTGTTACCTGGACAGCGGACCAATTGGGCAAGGCTATTTTCTACCATGATCGTATTTTAAA
TGAAAGATTTATGACAGTCCTGACTTGA
-Exemplary Pseudomonas putida YLE2_PSEPU Metapyrocatechase
(xylE-Pp) Amino Acid Sequence
SEQ ID NO: 272
MKKGVMRPGHVQLRVLNLEAALTHYRDLLGLIEMDRDEQGRVYLKAWSEVDKFSVVLREADQPG
MDFMGFKVTDDACLTRLAGELLEFGCQVEEIPAGELKDCGRRVRFLAPSGHFFELYAEKEYTGK
WGIEEVNPEAWPRDLKGMRAVRFDHCLMYGDELQATYELFTEVLGFYLAEQVIEDNGTRISQFL
SLSTKAHDVAFIQHAEKGKFHHVSFFLETWEDVLRAADLISMTDTSIDIGPTRHGLTHGKTIYF
FDPSGNRNEVFCGGDYNYPDHKPVTWTADQLGKAIFYHDRILNERFMTVLT
-Exemplary Burkholderia sp. DBT1 OX extradiol dioxygenase DbtC
(Dbtc-B-DBT1-OX) Nucleic Acid Coding Sequence
SEQ ID NO: 273
ATGGAAAACATTGGGGTCACAGAATTAGGTTATATCGGAATCGGCGTCAGCGACATGGACGCGT
GGCGGGAATATGCCGCGAACGTCATGGGTCTGGAGGTGCTCGAGGAGGGCGACAAAGATCGATT
CTATTTGCGCCTCGATTATCAGCACCATCGGATCGTGGTTCATAATTCGGGGAGCGATGACTTG
GACTACGCTGGCTGGCGAGTTGCAGGCCCTGAAGAATTTGACCAGATCAAACGCAATCTCGAGA
AAGCCAGAGTCGATTTTCGGCAAGCCGATGCAGCAGAGTGCGACGAGCGTATGGTGTTGGATCT
TGTCAAATTCCTCGATCCGGGCGGTAACCCTACAGAAATCTATCATGGCCCGCGGGTTGACTAT
CACAAACCCTTCCATGCTGGCCGCAGAATGCACGGCCGTTTCTCGACCGGTGATCAAGGGCTCG
GTCATATCGGTCATATCATTCTACGACAGGAAAATCCACAAAAGGCATACGAATTCTACGCAAG
AGTTTTGGGCATGCGTGGATCCGTCGAGTATCACATACCGATTCCACACATCGGAATTACTGCG
AAGCCCATTTTTTTGCATTCCAACGATCGAGACCATTCGGTTGCATTTTTAGGTGGGCCAGCGG
CCAAGCGAATCAATCATTTGATGATCGAAGTCGACAATATCGACGACGTTGGCTATACGCACGA
TATTGTCAGGAAACGGCAGATCCCGGTCGCCGTGCAGCTCGGCAAACATTCGAATGATCAAATG
GTCAGCTTTTATTCGGCAAACCCATCTAATTGGCTGTTCGAATATGGCGCATTAGGACGTAGAG
CGACCTATCAGTCGGAATATTATGTTTCGGACATCTGGGGGCATGAAATTGAAGCAACTGGATA
CGGCCTTGACGTCAAATTGAAAGAATAA
-Exemplary Burkholderia sp. DBT1 OX extradiol dioxygenase DbtC
(Dbtc-B-DBT1-OX) Amino Acid Sequence
SEQ ID NO: 274
MENIGVTELGYIGIGVSDMDAWREYAANVMGLEVLEEGDKDRFYLRLDYQHHRIVVHNSGSDDL
DYAGWRVAGPEEFDQIKRNLEKARVDFRQADAAECDERMVLDLVKFLDPGGNPTEIYHGPRVDY
HKPFHAGRRMHGRESTGDQGLGHIGHIILRQENPQKAYEFYARVLGMRGSVEYHIPIPHIGITA
KPIFLHSNDRDHSVAFLGGPAAKRINHLMIEVDNIDDVGYTHDIVRKRQIPVAVQLGKHSNDQM
VSFYSANPSNWLFEYGALGRRATYQSEYYVSDIWGHEIEATGYGLDVKLKE
-Exemplary Ralstonia pickettii catechol 2,3-dioxygenase (tbuE-RpC)
Nucleic Acid Coding Sequence
SEQ ID NO: 275
ATGGGTGTTCTACGAATCGGCATGCGGCCGGTCGTGGCAGGGAGCTTCGGGCAGCATCACCGTC
TTCAGGCCCCACGCTTCGATCTTGGCCTGCAGCTCGTCGAGGTCGGCATCCTTCTCGACCTTGT
AGGCGAGGTGGTTGAGGCCGGCCTGATCCGACGGCGTGAGGATGAGCGAATACTTGTCCCACTC
GTCCCAGCACTTGAAGTAGACGTTGCCGGCGTTGTCCTGCATCGTCACCTTCATGCCGAGCACG
TTTTCGTAGTGCCGCACGGCGGCGGCCATGTCCATCACCTTCAGGCTGGCATGCTGCAGTTCAA
TCTGCCGAGCGGTCACGAGATGCGGCTCTATGCGATGAAGGAGGTGGTCGGCACCGAGGTGGGC
AGCCGCAACCCCGACCCGTGGCCCGACAACCTCAAGGGCGCTGGCGTGCACTGGCTGGATCATG
CCCTGTTGATGTGCGAGTTGAACCCGGAAGCCGGCGTCAACACGGTTGCCGATAACACGCGCTT
CATGCAGGAGGTGCTGGGCTTCTTCCTGACGGAGCAGGTGGTCGTCGGCCCGGACGGTTGCGTA
CAGGCGGCTGCACGGCTGGCCCGCAGCACCACGCCGCACGACATCGCATTCGTCGGTGGTCCGC
GCAGCGGCCTGCACCACATTGCCTTCTTCCTGGACTCGTGGCACGACGTGCTGAAGGCCGCGGA
TGTCATGGCCAAGAACCAGACGAAGATCGACGTGGCACCCACGCGTCACGGCATCACGCGCGGG
CAGACGATCTACTTCTTCGACCCCAGCGGCAACCGCAACGAGACATTCGCCGGCCTGGGCTACC
TCGCGCAGCCGGATCGTCCCGTCACCACGTGGAGTGAAGACAAGCTGTGGACCGGCATCTTCTA
CCACACCGGCGATACGCTGGTGCCGTCGTTCACCGATGTGTACACCTGA
-Exemplary Ralstonia pickettii catechol 2,3-dioxygenase (tbuE-RpC)
Amino Acid Sequence
SEQ ID NO: 276
MGVLRIGMRPVVAGSFGQHHRLQAPREDLGLQLVEVGILLDLVGEVVEAGLIRRREDERILVPL
VPALEVDVAGVVLHRHLHAEHVFVVPHGGGHVHHLQAGMLQFNLPSGHEMRLYAMKEVVGTEVG
SRNPDPWPDNLKGAGVHWLDHALLMCELNPEAGVNTVADNTRFMQEVLGFFLTEQVVVGPDGCV
QAAARLARSTTPHDIAFVGGPRSGLHHIAFFLDSWHDVLKAADVMAKNQTKIDVAPTRHGITRG
QTIYFFDPSGNRNETFAGLGYLAQPDRPVTTWSEDKLWTGIFYHTGDTLVPSFTDVYT
-Exemplary Pseudomonas putida catechol 1,2-dioxygenase (catA-Pp)
Nucleic Acid Coding Sequence
ATGACCGTGAAAATTTCCCACACTGCCGATGTTCAAGCCTTCTTCAACAAGGTGGCTGGCCTGG
ACCATGCCGAGGGCAACCCACGCTTCAAGCAGATCATCCTGCGCGTCCTGCAGGACACCGCGCG
CCTGGTCGAAGACCTGGAAATCACCGAAGACGAATTCTGGCACGCCATTGACTACCTCAACCGC
CTGGGCGGCCGTAACGAGGCGGGCCTGCTGGCCGCAGGCCTGGGTATCGAGCACTTCCTCGACC
TGCTGCAGGACGCCAAGGACGCCGAAGCCGGCTTGGGTGGCGGCACACCGCGCACCATCGAAGG
CCCGCTGTACGTGGCCGGTGCGCCGCTGGCGCAAGGCGAAGCGCGCATGGATGACGGCACCGAT
CCGGGTGTGGTGATGTTCCTTCAGGGCCAGGTGTTCGATGCCGACGGCAAGCCGCTCGCCGGTG
CCACCGTCGACCTCTGGCACGCCAACACCCAGGGCACTTATTCGTACTTCGATTCGACTCAGTC
CGAATACAACCTGCGCCGCCGCATCATCACCGATGCCGTGGGCCGCTACCGTGCGCGCTCCATC
GTGCCGTCGGGGTACGGCTGCGACCCGCAGGGCACGACCCAGGAATGCCTGGACCTGCTCGGCC
GCCACGGCCAGCGCCCGGCGCACGTGCACTTCTTCATCTCGGCACCTGGGTTCCGCCACCTGAC
CACGCAGATCAACTTGAAGATGCCGCTGCCGCGCGTGATCGCGGTGTTCAGGGCGAGCGCTTTG
CCGAACTGCGAGGGCGACAAGTACCTGTGGGATGACTTCGCCTACGCCACCCGTGACGGGTTGA
TTGGCGAGCTGCGCTTTGTCGCGTTCGACTTCCACCTGCAGGCGGCTGCAGCGCCGGAGGCCGA
AGCGCGCAGCCATCGGCCGCGTGCGTTGCAGGAGGGCTGA
-Exemplary Pseudomonas putida catechol 1,2-dioxygenase (catA-Pp)
Amino Acid Sequence
SEQ ID NO: 278
MTVKISHTADVQAFFNKVAGLDHAEGNPRFKQIILRVLQDTARLVEDLEITEDEFWHAIDYLNR
LGGRNEAGLLAAGLGIEHFLDLLQDAKDAEAGLGGGTPRTIEGPLYVAGAPLAQGEARMDDGTD
PGVVMFLQGQVFDADGKPLAGATVDLWHANTQGTYSYFDSTQSEYNLRRRIITDAVGRYRARSI
VPSGYGCDPQGTTQECLDLLGRHGQRPAHVHFFISAPGFRHLTTQINLKMPLPRVIAVFRASAL
PNCEGDKYLWDDFAYATRDGLIGELRFVAFDFHLQAAAAPEAEARSHRPRALQEG
-Exemplary Pseudomonas reinekei catechol 1,2-dioxygenase (catA-Pr)
Nucleic Acid Coding Sequence
SEQ ID NO: 279
ATGAACGTCAAAATTTCCCACACTGCTGAAGTCCAGAATTTTCTCGAAGAGGCCAGCGGCCTGC
ACAACGACGCCGGCAATCCACGGACCAAGGCGCTGATCTATCGCATCCTGCGTGACTCGGTGAA
CATCATCGAAGACCTCGCCGTGACCCCGGAAGAGTTCTGGAAAGCGGTCAACTACCTGAACGTG
CTGGGTGCGCGTCAGGAAGCCGGACTGGTGGTGGCCGGTCTTGGTCTGGAGCACTACCTCGACC
TGCTGATGGACGCCGAAGACGAGCAGGCCGGCAAATCCGGCGGCACCCCGCGTACCATCGAAGG
CCCGCTGTACGTGGCGGGTGCACCATTGTCCGAAGGCGAAGCGCGCCTGGATGACGGGGTTGAT
CCGGGTGTGACCCTGTTCATGCAAGGCCGCGTGTTCAACACCGCAGGCGAGCCTCTGGCCGGTG
CCGTGGTGGACGTCTGGCACGCCAATACCGGCGGTACCTACTCGTACTTCGACCCGGCCCAATC
GGAATTCAACCTGCGTCGCCGCATCGTCACCGACGCCGATGGCCGCTACCGTTTCCGCAGCATC
GTGCCGTCGGGTTACGGCTGCCCGCCGGACGGTCCGACCCAGCAACTGCTCGATCAACTGGGCC
GTCATGGCCAGCGTCCGGCGCACGTGCACTTCTTCATTTCCGCACCGGATCATCGCCACCTGAC
GACGCAGATCAACCTCGATGGCGAAAAATACCTGCATGACGACTTCGCTTACGCCACCCGTGAC
GAGCTGATCGCCAAGATCACCTTCAGCGACGATCAGCAGCGCGCCGCTGCCTACGGTGTGAGCG
GTCGCTTTGCCGAAATCGAGTTCGATTTCACCCTGCAATCGTCTGCCCAGCCTGAAGAACAACA
GCGCCACGAGCGGGTTCGCGCACTGGAAGACTGA
-Exemplary Pseudomonas reinekei catechol 1,2-dioxygenase (catA-Pr)
Amino Acid Sequence
SEQ ID NO: 280
MNVKISHTAEVQNFLEEASGLHNDAGNPRTKALIYRILRDSVNIIEDLAVTPEEFWKAVNYLNV
LGARQEAGLVVAGLGLEHYLDLLMDAEDEQAGKSGGTPRTIEGPLYVAGAPLSEGEARLDDGVD
PGVTLFMQGRVFNTAGEPLAGAVVDVWHANTGGTYSYFDPAQSEFNLRRRIVTDADGRYRFRSI
VPSGYGCPPDGPTQQLLDQLGRHGQRPAHVHFFISAPDHRHLTTQINLDGEKYLHDDFAYATRD
ELIAKITFSDDQQRAAAYGVSGRFAEIEFDFTLQSSAQPEEQQRHERVRALED
-Exemplary Pseudomonas reinekei catechol 1,2-dioxygenase (salD-Pr)
Nucleic Acid Coding Sequence
SEQ ID NO: 281
ATGACCGTAAAAATCAGCCACACCGCTGAAGTGCAGGACCTGATCAAGGAGGCCGCCGGTTTCA
ACAGCGACCAGGGCAGCCCGCGCCTCAAGCAACTGATGCATCGCCTGATCAGCGACGCCTTCAA
GATCATCGAAGACCTGGAAGTGACCGAAGACGAATTCTGGTTGGCGGTGGATCGCCTGAACAAG
GTCGGCGCCCACGCTGAGTTCGGCTTGCTGCTGCCGGGCCTGAGCATGGAGCACTTCATGGACC
TGCTGCAGGACGCCAAGGACCAGCAGATAGGCCTGGCCGGCGGGACCCCGCGGACCATCGAAGG
GCCTCTGTACGTGGCTAACGCGCCGCTCAGCGAAGGTTTTGCGCGCATGGATGATGGCAGTGAA
GATGACGTCGGCATCCCGCTGTTCATCAAGGGTACGGTCCTCAATACGGACGGCAAGCCGGTGG
CCGGTGCGATCGTTGATCTGTGGCACGCCAACACCAATGGCACCTACTCCTACTTCGACGAGAG
TCAGTCGGCGTTCAACCTGCGTCGCCGGATCAAGACCGACGCTGAAGGCCGTTACACCGCGCGC
AGCATCATTCCGAGCGGTTACGGTGTGAATCCCGAAGGGCCGACCCAGGAATGCCTGAGCGCCC
TGGGCCGCCACGGTCAGCGCCCGGCACATATCCATGTGTTCGTTTCCGCACCGGAACATCGTCA
TCTGACCAGCCAGATCAACCTTGCCGGCGACAAATACCTGTGGGACGACTTCGCCTACGCCACC
CGTGAAGGGCTGGTCGGCGAAGCCAGACTGCTCGACAACGCCGACGCCTCGAAAGCCCATGGTC
TGGACGGGCGACAGTTCGCTGAACTCGAATTCGACTTCGTTCTGCAACCGGCGGTCAACGCCGA
CGATGAACACCGCAGCCAGCGTCCACGCGCCGGCCAATGA
-Exemplary Pseudomonas reinekei catechol 1,2-dioxygenase (salD-Pr)
Amino Acid Sequence
SEQ ID NO: 282
MTVKISHTAEVQDLIKEAAGFNSDQGSPRLKQLMHRLISDAFKIIEDLEVTEDEFWLAVDRINK
VGAHAEFGLLLPGLSMEHFMDLLQDAKDQQIGLAGGTPRTIEGPLYVANAPLSEGFARMDDGSE
DDVGIPLFIKGTVLNTDGKPVAGAIVDLWHANTNGTYSYFDESQSAFNLRRRIKTDAEGRYTAR
SIIPSGYGVNPEGPTQECLSALGRHGQRPAHIHVFVSAPEHRHLTSQINLAGDKYLWDDFAYAT
REGLVGEARLLDNADASKAHGLDGRQFAELEFDFVLQPAVNADDEHRSQRPRAGQ

### Modifying Plant Microbiome Components

[0407] Among other things, the present disclosure provides compositions, methods of producing, and methods of using genetically modified plants with optimized microbiomes capable of providing useful catabolic and/or anabolic functions.

[0408] In certain embodiments of compositions and methods described herein, relevant microorganisms are screened for certain characteristics prior to their use and/or incorporation into the phytosphere (e.g., phyllosphere, endosphere, and/or rhizosphere). In certain embodiments, microorganisms are able to interact mutualistically with the host plant, are well tolerated by the plant, are tolerated by the plant, and/or are only mildly pathogenic to the plant. In certain embodiments, microorganisms are able to degrade and/or metabolize one or more relevant compounds as described herein (e.g., VOCs, e.g., formaldehyde, methanol, benzene, toluene, ethylbenzene, and/or xylene). In certain embodiments, microorganisms are not known to increase environmental risk and/or have adverse effects on human health.

[0409] After uptake in the roots and leaves, plants can metabolize, sequestrate and/or excrete air pollutants. In addition, plant-associated microorganisms play an important role by degrading, detoxifying or sequestrating the pollutants and by promoting plant growth.

[0410] In case of air pollution, the surface of leaves and stems is known to adsorb significant amounts of pollutants. Therefore, bacteria living on these surfaces, called the phyllosphere bacteria, might be of high importance.

[0411] In certain cases, rainfall causes the flow of pollutants down the aerial tissues and to the soil, where it is absorbed right below the plant. In such embodiments, pollutants can come into contact with the soil, the plant's rhizosphere and the roots

Rhizosphere and/or Container

[0412] In certain embodiments, compositions and methods described herein comprise microbes that colonize the rhizosphere, surrounding media (e.g., soil or water), and/or container comprising a host plant. In certain embodiments, these microbes are described as members of the media microbiome. In certain embodiments, such microbes may be growing freely in the media (e.g., soil, water, etc.), and/or in association with the root or other immediate plant surfaces. In certain embodiments, microbes that colonize the rhizosphere of a host plant may also or alternatively colonize the phyllosphere and/or endosphere of a host plant.

[0413] In certain embodiments, such microbes may have biodegradation capabilities. In certain embodiments, such microbes may have enhanced biodegradation capabilities.

[0414] In certain embodiments, such microbes are not pathogenic or are only mildly pathogenic. In certain embodiments, such microbes interact mutualistically with the host plant, e.g., to promote VOC clearance without significantly reducing host plant endogenous functions (e.g., growth and/or reproduction), preferentially, promoting VOC clearance while improving host plant endogenous functions.

[0415] In certain embodiments, microbes that have demonstrated and/or known mutualistic interactions with a plant are prioritized as components of a composition as described herein.

[0416] In some embodiments, an exemplary rhizosphere component may be Bacillus metanolcius (PB1) (BmPB1), a bacteria that may be found on the roots or in the nearby soil of certain plants.

[0417] In some embodiments, an exemplary rhizosphere component may be Ogataea methanolica (KL1) (OmKL1), a fungal yeast that may be found on the roots or in the nearby soil of certain plants.

[0418] In some embodiments, an exemplary rhizosphere component may be Pseudomonas putida (F1) (PpF1), a bacteria that may be found on the roots or in the nearby soil of certain plants.

[0419] In some embodiments, an exemplary rhizosphere component may be Phanerochaete chrysosporium (Burdsall) (PcBur), a fungi (basidiomycete) that may be found on the roots or in the nearby soil of certain plants.

[0420] In some embodiments, an exemplary rhizosphere component may be Rugosibacter aromaticivorans (Ca6T) (RaCa6), a fungi (basidiomycete) that may be found on the roots or in the nearby soil of certain plants.

[0421] In some embodiments, an exemplary rhizosphere component may be a microbe isolated as described herein (e.g., see Example 5).

Phyllosphere and/or Endosphere

[0422] In certain embodiments, compositions and methods described herein comprise microbes that colonize the phyllosphere of a host plant. In certain embodiments, microbes that colonize the phyllosphere of a host plant may also or alternatively colonize the rhizosphere and/or endosphere of a host plant.

[0423] In certain embodiments, a phyllosphere includes microbes colonizing the leaf (e.g., the upper adaxial surface, and/or the lower abaxial surface) and/or stem surfaces of the plant. In certain embodiments, a majority of phyllosphere dwelling microbes may be bacterial and/or fungal yeasts (e.g., as analyzed by 16S sequencing).

[0424] In some cases, leaves have been shown to host several VOC-degrading microorganisms. The phyllosphere is one of the most prevalent microbial habitats on earth: the global bacterial population present in the phyllosphere could comprise up to 10²⁶ cells, fungal populations are generally less numerous, and archaea may be considered a minor component or even not abundant. In some embodiments, phyllosphere communities are affected by a variety of environmental factors, including UV exposure, pollution, nitrogen fertilization, water limitations and high temperature shifts, as well as biotic factors, such as leaf age and the co-presence of other microorganisms. In some embodiments, plant leaves are able to adsorb or absorb air pollutants, and habituated microbes on leaf surface and in leaves (endophytes) are able to biodegrade or transform pollutants into less or nontoxic molecules.

[0425] In certain embodiments, microbes that occupy the phyllosphere that have certain biodegradation capabilities are prioritized as preferential components of a composition.

[0426] In certain embodiments, microbes that occupy the phyllosphere that are not considered pathogenic are prioritized as preferential components of a composition.

[0427] Phyllosphere bacterial communities are generally dominated by Proteobacteria, such as Methylobacterium and Sphingomonas. Beijerinckia, Azotobacter, Klebsiella, and Cyanobacteria like Nostoc, Scytonema, and Stigonema also reside in the phyllosphere (see e.g., Xianying Wei et al., Phylloremediation of Air Pollutants: Exploiting the Potential of Plant Leaves and Leaf-Associated Microbes. Frontiers in Plant Science, 2017).

[0428] Dominant fungi in the phyllosphere include Ascomycota, of which the most common genera are Aureobasidium Cladosporium, and Taphrina (Coince et al., 2013; Kembel and Mueller 2014).

[0429] Basidiomycetous yeasts belonging to the genera Cryptococcus and Sporobolomyces are also abundant in phyllosphere.

[0430] Phylloremediation was first coined by Sandhu et al. (2007), who demonstrated that surface-sterilized leaves took up phenol, and leaves with habited microbes or a inoculated bacterium were able to biodegrade significantly more phenol than leaves alone.

[0431] The most efficient species in removal of formaldehyde include Osmunda japonica, Selaginella tamariscina, Davallia mariesii, and Polypodium formosanum. Surprisingly, these efficient plants belong to pteridophytes, commonly known as ferns and fern allies.

[0432] Formaldehyde can also be assimilated as a carbon source by bacteria (Vorholt, 2002). Such assimilation occurs in Methylobacterium extorquens through the reactions of the serine cycle (Smejkalova et al., 2010), in Bacillus methanolicus through the RuMP cycle (Kato et al., 2006), and in Pichia pastoris through the xylulose monophosphate cycle (Lüers et al., 1998).

[0433] As described herein, in some embodiments, bacteria and fungi used to colonize roots can also colonize leaves and could be used for phylloremediation of formaldehyde, methanol, and/or BTEX in the air.

[0434] In some embodiments, an exemplary endosphere component may be Methylobacterium oryzae (CBMB20) (MoCBM), a bacteria that may be found on the leaves of certain plants.

[0435] In some embodiments, an exemplary phyllosphere component may be Paraburkholderia phytofirmans (PsJN) (PpPsJ), a bacteria that may be found on the epidermis of certain plants.

[0436] In some embodiments, an exemplary phyllosphere component may be Methylobacterium extorquens (PA1) (MePA1), a bacteria that may be found on the leaves of certain plants.

[0437] In some embodiments, an exemplary phyllosphere and/or endosphere component may be a microbe isolated as described herein (e.g., see Example 5).

### Compositions

[0438] Among other things, the present disclosure provides compositions.

[0439] In certain embodiments, a composition comprises a genetically modified plant comprising a modified passive diffusion phenotype. In some embodiments, such a modified passive diffusion phenotype is due to alterations to a plant's stomatal density, trichome density, and/or wax levels.

[0440] In certain embodiments, a composition comprises a genetically modified plant comprising a modified VOC metabolism phenotype. In some embodiments, such a VOC metabolism phenotype is due to alterations to a plant's metabolism pathways, particularly pathways that utilize substrates such as but not limited to: formaldehyde, formate, D-xylulose 5-phosphate, benzaldehyde, dihydroxyacetone, D-arabino-3-hexulose 6-phosphate (Hu6P, glycoaldehyde, acetylphosphate, pyruvate, 2-keto-4-hydroxybutyrate (HOBA), 3-hydroxypropionaldehyde (3-HPA), aldehyde, benzene, ethylbenzene, toluene, xylene, phenol, phenol (like), catechol, catechol (like), or any combination of these substrates.

[0441] In certain embodiments, a composition comprises a genetically modified plant comprising a modified VOC metabolism phenotype.

[0442] In certain embodiments, a composition comprises a genetically modified plant comprising a modified stomatal flux phenotype.

[0443] In certain embodiments, a composition comprises a genetically modified plant comprising a modified VOC metabolism phenotype and a modified stomatal flux phenotype.

[0444] In certain embodiments, a composition comprises a genetically modified plant comprising a modified VOC metabolism phenotype, and an engineered microbe.

[0445] In certain embodiments, a composition comprises a genetically modified plant comprising a modified VOC metabolism phenotype, an engineered microbe, and an active air flow system.

[0446] In certain embodiments, a composition comprises a genetically modified plant comprising a modified VOC metabolism phenotype, a modified stomatal flux phenotype, and an active air flow system.

[0447] In certain embodiments, a composition comprises a genetically modified plant comprising a modified VOC metabolism phenotype, a modified stomatal flux phenotype, and an engineered microbe.

[0448] In certain embodiments, a composition comprises an engineered microbe.

[0449] In certain embodiments, a composition comprises an engineered eukaryotic cell.

[0450] In certain embodiments, a composition comprises an engineered prokaryotic cell.

[0451] In certain embodiments, a composition comprises an engineered microbe comprising a modified VOC metabolism phenotype.

[0452] In certain embodiments, a composition comprises an engineered microbe comprising a modified VOC tolerance phenotype.

### Methods

[0453] In some embodiments, the present disclosure provides methods of using, making, and/or characterizing compositions described herein.

### Methods of Use

[0454] In some embodiments, provided herein are methods of using described compositions for the remediation of indoor air quality.

[0455] In some embodiments, provided compositions are utilized to improve the indoor air quality of a single family dwelling.

[0456] In some embodiments, provided compositions are utilized to improve the indoor air quality of a multi-family dwelling.

[0457] In some embodiments, provided compositions are utilized to improve the indoor air quality of a private building.

[0458] In some embodiments, provided compositions are utilized to improve the indoor air quality of a public building.

[0459] In some embodiments, provided compositions are utilized to improve the indoor air quality of vehicles.

[0460] In some embodiments, provided compositions are utilized to improve the indoor air quality of air-tight compartments (e.g., space shuttles, space stations, decompression chambers, submersibles, etc.,)

[0461] In some embodiments, provided compositions are utilized to improve outdoor air quality in areas comprising high levels of pollutants.

### Evaluating Air Quality

[0462] In some embodiments, indoor air quality can be assessed prior to, during, and/or after exposure to compositions and methods described herein.

[0463] In some embodiments, indoor air quality is assessed for levels of formaldehyde.

[0464] In some embodiments, indoor air quality is assessed for levels of methanol.

[0465] In some embodiments, indoor air quality is assessed for levels of benzene.

[0466] In some embodiments, indoor air quality is assessed for levels of ethylbenzene.

[0467] In some embodiments, indoor air quality is assessed for levels of toluene.

[0468] In some embodiments, indoor air quality is assessed for levels of xylene.

[0469] In some embodiments, indoor air quality is assessed for levels of fine particulate matter.

### Methods of Characterizing

[0470] In certain embodiments, compositions are characterized based upon their ability to reduce a level of formaldehyde in an indoor air environment relative to a control composition (e.g., a non-engineered plant and/or microbe).

[0471] In certain embodiments, compositions are characterized based upon their ability to reduce a level of methanol in an indoor air environment relative to a control composition (e.g., a non-engineered plant and/or microbe).

[0472] In certain embodiments, compositions are characterized based upon their ability to reduce a level of benzene in an indoor air environment relative to a control composition (e.g., a non-engineered plant and/or microbe).

[0473] In certain embodiments, compositions are characterized based upon their ability to reduce a level of ethylbenzene in an indoor air environment relative to a control composition (e.g., a non-engineered plant and/or microbe).

[0474] In certain embodiments, compositions are characterized based upon their ability to reduce a level of toluene in an indoor air environment relative to a control composition (e.g., a non-engineered plant and/or microbe).

[0475] In certain embodiments, compositions are characterized based upon their ability to reduce a level of xylene in an indoor air environment relative to a control composition (e.g., a non-engineered plant and/or microbe).

[0476] In certain embodiments, compositions are characterized based upon their ability to impact at least one health outcome of an individual that spends a significant period of time indoors. In such an embodiment, a health outcome of an individual may be compared to a control individual, or may be compared to a control states (e.g., prior to or following exposure to compositions as described herein). Such a health outcome may be but is not limited to: the rate of respiratory illness, cognitive function, and/or well-being.

### Production Methods

### Propagating Plants

[0477] In some embodiments, compositions described herein are provided as part of a method of producing a phytoremediating plant, or a method of manipulating, and preferably improving phytoremediating properties of a plant, comprising introducing into a plant cell at least one vector as described herein. In some embodiments, a method entails causing or allowing recombination between a vector and the plant cell genome (e.g., Nuclear, mitochondrial, and/or chloroplastic genetic material) to introduce at least nucleotide sequence encoding a metabolism modifying gene into the plant genome. It may optionally further comprise the steps of regenerating a plant and cultivating it.

[0478] In some embodiments, compositions described herein comprise Epipremnum aureum that has been transformed by Agrobacterium tumefaciens comprising a vector of interest. In some embodiments, Epipremnum aureum is transformed through methods known in the art, for example, as described in Kotsuka & Tada “Genetic transformation of golden pothos (Epipremnum aureum) mediated by Agrobacterium tumefaciens”, Plant Cell Tissue Organ Culture, 2008; which is incorporated herein by reference in its entirety.

[0479] In some embodiments, compositions described herein comprise Epipremnum aureum that has been propagated through a traditional method such as “eye cutting”. In some embodiments, Epipremnum aureum is propagated through methods known in the art, for example, as described in UC MASTER GARDENERS NAPA COUNTY “Healthy Garden Tips—Plant Propagation” handbook, published in March 2011 by the University of California and found on the internet at “https://ucanr.edu/sites/ucmgnapa/files/81929.pdf”; which is incorporated herein by reference in its entirety.

[0480] In some embodiments, following transformation, a plant may be regenerated, e.g. from single cells, callus tissue or leaf discs, as is standard in the art. Most plants can be entirely regenerated from cells, tissues and organs of said plant. Available techniques are known in the art and reviewed in Vasil et al., Cell Culture and Somatic Cell Genetics of Plants, Vol I, II and III, Laboratory Procedures and Their Applications, Academic Press, 1984, and Weissbach and Weissbach, Methods for Plant Molecular Biology, Academic Press, 1989.

[0481] In some embodiments, compositions described herein comprise Epipremnum aureum that has been regenerated from a callus following transformation. In some embodiments, Epipremnum aureum is regenerated through methods known in the art, for example, as described in Zhang, Chen, and Henny “Direct somatic embryogenesis and plant regeneration from leaf, petiole, and stem explants of Golden Pothos” Plant Cell Reports 2005; which is incorporated herein by reference in its entirety.

[0482] In some embodiments, microbes are provided to a plant and/or other media to create a composition suitable for VOC biodegradation.

[0483] In some embodiments, microbes are sprayed onto a plant. In some embodiments, plants are dipped into a solution comprising microbes. In some embodiments, microbes are sprayed onto activated charcoal that may act as a microbe and/or VOC absorption depot within a growth media (e.g., soil and/or hydroponic water). In some embodiments, microbes are applied to a suitable microbial growth media. In some embodiments, an interior of a container is coated with a composition comprising microbes. In some embodiments, microbes are supplied as a powder and/or liquid to be added to a plant during regular maintenance (e.g., during watering, fertilizing etc.).

[0484] In some embodiments, application of a microbe may occur one time, two times, three times, four times, five times, or greater than five times. In some embodiments, microbes are reapplied every 2 weeks, 4 weeks, 6 weeks, 8 weeks, 10 weeks, or 12 weeks. In some embodiments, microbes are reapplied based upon a method of characterizing as described herein, e.g., when a level of VOC biodegradation no longer meets a known and/or expected level. In some embodiments, microbes are reapplied based upon the measurement of culture forming units found in a sample of a plant microbiome when compared to an appropriate control.

### EXAMPLES

[0485] The disclosure is further described in detail by reference to the following experimental examples. These examples are provided for purposes of illustration only, and are not intended to be limiting unless otherwise specified. Thus, the disclosure should in no way be construed as being limited to the following examples, but rather should be construed to encompass any and all variations that become evident as a result of the teaching provided herein.

[0486] It is believed that one or ordinary skill in the art can, using the preceding description and following Examples, as well as what is known in the art, to make and utilize technologies of the present disclosure.

### Example 1: Creation, Isolation, and Formulation of Vectors for Plant and/or Microbe Transformation

[0487] This example provides information regarding the creation, isolation, and formulation of vectors for plant and/or microbe transformation.

[0488] Genetic manipulation techniques were performed using technologies known in the art (e.g. Golden Gate cloning systems) and according to manufacturer's instructions. Genes were cloned from appropriate genomic DNA sources isolated using standard protocols such as miniprep or midiprep. The correct sequence of genes of interest were characterized using PCR followed by restriction enzyme digestion and gel electrophoresis and/or by PCR followed by Sanger Sequencing.

[0489] Table 1 comprises promoters utilized herein to isolate, clone, and/or verify certain genes of interest.

TABLE 1
Cloning and Sequencing Primers

| SEQ | | | |
|---|---|---|---|
| ID NO: | Target Gene | Primer Name | Primer Sequence |
| 283 | Formolase | FormolaseqF1 | ATTCCTCTGCCACGGCTATC |
| 284 | Formolase | FormolaseqR1 | TTCTTCCCGCTTCGAGGTCT |
| 285 | Formolase | Formolase_seq_F | GCTGCCTGACGCTATGAGG |
| 286 | Formolase | Formolase_seq_R | GATTCCTTGGAGTCTGCCTAG |
| 287 | FALDHEa | EaFALDH_PT_qF1 | TGGAGGATTTAAGTCTAGGT |
| 288 | FALDHEa | EaFALDH_PT_qR1 | CCCAAAGTCAAATTATGAGT |
| 289 | FALDHEa | Ea_FALDH_R | TCAACCTTCAGCCAATACAC |
| 290 | FALDHEa | Ea_FALDH_F | GTCAATGTCAATGCCAATAA |
| 291 | FALDHEa | FALDH_Ea_seq_F | TGGATTGGGAGCTGTTTGGAATA |
| 292 | FALDHEa | FALDH_Ea_seq_R | TCCTCCATCAGTCAAATCAACCA |
| 293 | FALDH9 | FALDH9_qPCR_F | CTGATGATGGCTATATTGTGG |
| 294 | FALDH9 | FALDH9_qPCR_R | TTACTTCTGTGTTGAGCATT |
| 295 | FALDH9 | FALDH_9_seq_F | CGTATGGATTCAATCTCGGTGGA |
| 296 | FALDH9 | FALDH_9_seq_R | ATCGCCTCTATTTGGTCAGGTAC |
| 297 | GD- | FALDH10_qPCR_F | TTGACTGCGACCTGAACGACCT |
| | FALDH10 | | |
| 298 | GD- | FALDH10_qPCR_R | CGGGACAGAGACTATACCAC |
| | FALDH10 | | |
| 299 | GD- | FALDH_10_seq_F | CATGAAGGTGCCAGAAGGAATG |
| | FALDH10 | | |
| 300 | GD- | FALDH_10_seq_R | GCACCCTGTCCTTTGGTAATTTC |
| | FALDH10 | | |
| 301 | GD- | FALDH11qF1 | CAGAGCATTGCGACATCGG |
| | FALDH11 | | |
| 302 | GD- | FALDH11qR1 | AACATTCACAGCGAGCAC |
| | FALDH11 | | |
| 303 | GD- | FALDH_11_seq_F | GCAAGCAGAGTATTTAAGAGTGCC |
| | FALDH11 | | |
| 304 | GD- | FALDH_11_seq_R | AAAGATCGATTGTCTCAGCACCA |
| | FALDH11 | | |
| 305 | FDH3 | FDH3qF1 | TGGAATCACTTTGCGTCAGG |
| 306 | FDH3 | FDH3qR1 | AGTTTGAGGTTCGCGTCTGG |
| 307 | FDH3 | FDH_3_seq_F | CTTTGCAACACTGAAGGAAGCTA |
| 308 | FDH3 | FDH_3_seq_R | GCCTTTGCTCCATTCTCCAATAT |
| 309 | DASCanbo | DAS_CANBO_q_F1 | GGGAAGCGAACTCGAACAGG |
| 310 | DASCanbo | DAS_CANBO_q_R1 | TTCTTGCTGATTTCGGATGG |
| 311 | DASCanbo | DAS_CANBO_q_F2 | AAGAGGTAAGGTCCCGACTG |
| 312 | DASCanbo | DAS_CANBO_q_R2 | TTTCTTGCTGATTTCGGATG |
| 313 | DASCanbo | DAS_CANBO_q_F3 | GAGGTAAGGTCCCGACTGTG |
| 314 | DASCanbo | DAS_Canbo_seq_F | TGTAATTGGAACGTGATCGAGGT |
| 315 | DASCanbo | DAS_Canbo_seq_R | CTTTTGCAGGAATGTCCGAGAAG |
| 316 | DAKC | DAKCF_q_F1 | CCGCATTAACTTCGCTCTT |
| 317 | DAKC | DAKCF_q_R1 | GCACGTCCCGCATTAGCCT |
| 318 | DAKC | DHAK_Cf_seq_F | TACGCAAAATTCAGCTCAGGTTG |
| 319 | DAKC | DHAK_Cf_seq_R | TCATATCTAATGCGGTAACCAAGC |
| 320 | DAKP | DHAK_Pp_seq_F | TCGATAAGAACGATGAGGTGGTG |
| 321 | DAKP | DHAK_Pp_seq_R | TCTCCTGTCTTTGTAGCGTTCAA |
| 322 | DAKP | DAKpp_F_qPCR | ACGACGGAGCAGAAGCGAC |
| 323 | DAKP | DAKpp_R_qPCR | CGTCAGTGATACCGGAAA |
| 324 | DAKY | DHAK_Sc_seq_F | GATGGTTAACAACATGGGCGG |
| 325 | DAKY | DHAK_Sc_seq_R | TGAGTATATCACCACCAGCCTTG |
| 326 | DAKY | DAK2y_F_qPCR | AGCGGTGGAGAAGCGTTAGA |
| 327 | DAKY | DAK2y_R_qPCR | TGAAGTGCCGCCCATTGAGT |
| 328 | DAKE | DHAK_Ec_seq_F | TTAACTTTGAAACAGCGACCGAG |
| 329 | DAKE | DHAK_Ec_seq_R | CATCGACGGTTTGATCAAGGG |
| 330 | DAKE | DAKec_F_qPCR | AATAATCAAGGCCACTCAA |
| 331 | DAKE | DAKec_R_qPCR | CATGAATGCCGACGCCAAAC |
| 332 | HPS-Bm | HPS_BM_F_qPCR | GGTGGCATCAAGCTAGAAA |
| 333 | HPS-Bm | HPS_BM_R_qPCR | TCCACCACCGACGATAACC |
| 334 | HPS-Mg | HPS_MG_F_qPCR | AAGCAGGTGCCGATTTGGT |
| 335 | HPS-Mg | HPS_MG_R_qPCR | TCCGGCTATAGTTGAGTCGT |
| 336 | HPS/PHI-Bm | HPS/PHI_Bm_Ea_F | GACTTGCAGGCTGTTGGAAAAA |
| 337 | HPS/PHI-Bm | HPS/PHI_Bm_Ea_R | TCATAAGGCCCTGTTTCACAAGT |
| 338 | HPS/PHI-Mg | HPS/PHI_Mg_Ea_F | TACGATCCCTGCTGTCCAAAAAG |
| 339 | HPS/PHI-Mg | HPS/PHI_Mg_Ea_R | GGTCCACCTTGGCTGCTG |
| 340 | HPS/PHI- | HPSPHIaqF1 | ACAACAGGGCGGTAAAGTC |
| | archea | | |
| 341 | HPS/PHI- | HPSPHIaqR1 | TCGCAATATAATCTGTCGG |
| | archea | | |
| 342 | HPS/PHI- | HPS/PHI_a_seq_F | GCCGGTGGATTAAATCTGGAAAC |
| | archea | | |
| 343 | HPS/PHI- | HPS/PHI_a_seq_R | CATTGCATCCACTAGACCTCTCA |
| | archea | | |
| 344 | PHI-Bm | PHI_BM_F_qPCR | ACAATAGCAGCGGTGACAA |
| 345 | PHI-Bm | PHI_BM_R_qPCR | TACCGCGTCATAAAACAA |
| 346 | PHI-Mg | PHI_MG_F_qPCR | GCCGCTTTCACAACCAATCC |
| 347 | PHI-Mg | PHI_MG_R_qPCR | AGCGAACCAGCATACTGAC |
| 348 | TodC1(bnzA)- | TodC1_Ea_F | ATATGTTGGATCGGACAGAAGCA |
| | Pp | | |
| 349 | TodC1(bnzA)- | TodC1_Ea_R | CCAGCATCAAATTGGGATCTCC |
| | Pp | | |
| 350 | TodC1(bnzA)- | Tod-C1_F | GATCTCCCACGTAGAAACCAGATC |
| | Pp | | |
| 351 | TodC1(bnzA)- | Tod-C1_R | GATCTGGATACTTATCTCGGTGAGG |
| | Pp | | |
| 352 | TouA-P-OX | Toua_SP_F | GAGCAACAATCCATTCTAACATAAA |
| | | | TTCC |
| 353 | TouA-P-OX | Toua_SP_R | TCACACATTTGCATCTCTAATTTCG |
| 354 | TbuA1-Mp | TbuA1_F | GGACCCGTTAAAACTGTGAACAATT |
| 355 | TbuA1-Mp | TbuA1_R | TTGATGACATGATGAACACACGTAG |
| 356 | P450-RR | PR450RR_F1 | GTCTCCTATCCGTGTATCAGTTGTT |
| 357 | P450-RR | PR450_R1 | CTTACATTCTATGATGATGGCTGGC |
| 358 | PHOH-Pt | PHE_OH_F | TTTATCGCTCGCACCTAGACTTG |
| 359 | PHOH-Pt | PHE_OH_R | TTCTCCAAACAAGATTCCACAGTTG |
| 360 | BmoA-Pa | Bmoa_AP_F | ATGATCCCCACACTTATAGCATCTC |
| 361 | BmoA-Pa | Bmoa_AP_R | GAAGAAGGTTGATATTGCGTTTTGG |
| 362 | TmoF-Pm | TMOF_PM_F | AAGGTAATCAATCGAGCTGAAGGAA |
| 363 | TmoF-Pm | TMOF_PM_R | TGTCTCAATCGTCTCATTAGCAAGA |
| 364 | Stomagen | AtStomagen_F_qPCR | CAGCACCAACTTGTACG |
| 365 | Stomagen | AtStomagen_R_qPCR | GCACTGTTGATAGGGTC |
| 366 | Stomagen | OsX1/X2_F_qPCR | GTTCGACTGCTCCAATATGC |
| 367 | Stomagen | OsX1/X2_R_qPCR | TACACTTGAATCGACACCCT |
| 368 | Stomagen | NtMyb23_F_qPCR | ATCCGCACAAAGGCAATTAG |
| 369 | Stomagen | NtMyb23_R_qPCR | CAACATGAAAGCGTAAG |
| 370 | Stomagen | AtStomagen_Ea_F | ACTGGGAAACTATGTCGTACAGG |
| 371 | Stomagen | AtStomagen_Ea_R | TCTGCCCTACATTTGTAACGACA |
| 372 | Caprice | AtCaprice_Ea_F | TAATGTTTAGAAGCGACAAGGCC |
| 373 | Caprice | AtCaprice_Ea_R | AAGCCTTTCTGAAAAAGTCTCGC |
| 374 | Caprice | AtCaprice_F_qPCR | GCATAAACGACGACGGAGAC |
| 375 | Caprice | AtCaprice_R_qPCR | CTACTCACCTCTTCGGAACA |
| 376 | Glabra1 | Glabra1_F_qPCR | TGGTGTCCGCGTCCTATG |
| 377 | Glabra1 | Glabra1_R_qPCR | AGTAATGAGACGGGTCGTTG |
| 378 | Glabra2 | Glabra2_F_qPCR | GCCGCTTCTTCCTATCACC |
| 379 | Glabra2 | Glabra2_R_qPCR | CTCATATCCTGACCCGTCTT |
| 380 | Glabra3 | Glabra3_F_qPCR | GGGCTCACTGACAACCTAC |
| 381 | Glabra3 | Glabra3_R_qPCR | CGCACCTCAATTCTATGAC |
| 382 | Chitinase1 | Ea_CHI1_F | GAAGCCGACGAAGAACGACA |
| 383 | Chitinase1 | Ea_CHI1_R | CGGCACAATCCAGATTATCA |
| 384 | Actin | Ea_Act_F | TACAGTGCCCATCTACGAAG |
| 385 | Actin | Ea_Act_R | CCCGTTCAGCCGTTGT |
| 386 | mCherry | mCherry_qpcr_R1 | CTTCAGCTTGGCGGTCTGGG |
| 387 | mCherry | mCherry_qpcr_F2 | CGCCTACAACGTCAACATC |
| 388 | mCherry | mCherry_qpcr_R2 | CGGCGCGTTCGTACTGTTC |
| 389 | TurboGFP | TurboGFP_seq_F | TCTCCATACCTTCTTTCTCACGT |
| 390 | TurboGFP | TurboGFP_seq_R | CTCAACAGTAGCGTTAGACCTGA |
| 391 | HPT | HPT_Ea_F | AACCTGGCGTGACTTTATTTGTG |
| 392 | HPT | HPT_Ea_R | TGACGCCTCTCAAAATACCTTGT |
| 393 | HPT | HPT_seq_F | AAGACCTGCCTGAAACCGAAC |
| 394 | HPT | HPT_seq_R | GGACATTGTTGGAGCCGAAATC |
| 395 | Bar | Bar_seq_F | TCATTACATTGAGACTTCTACTGTGA |
| 396 | Bar | Bar_seq_R | CAATCACAGCAACCACAGACTTG |
| 397 | Kana | KANA_F1 (but reverse | CGGTAAGGATCTGAGCTACACATG |
| | | finally) | |
| 398 | Kana | KANA_F2 (but reverse | CCACAGTCGATGAATCCAGAAAAG |
| | | finally) | |
| 399 | Kana | KANA_R1 (but forward | GCTACCCGTGATATTGCTGAAGAG |
| | | finally) | |
| 400 | Nos | Nos_Pro_R | GAGACTCTAATTGGATACCGAGGG |
| 401 | Nos | Nos_Ter_F | AGCAGATCGTTCAAACATTTGGC |
| 402 | Nos | Nos_terminator_seq_F | GCGCGGTGTCATCTATGTTACTA |

[0490] Exemplary constructs as described in Table 2 were created.

TABLE 2
Exemplary Constructs Comprising At Least Two Genes of Interest

| Gene 1 | Gene 2 | Gene 3 | Gene 4 | Gene 5 | Gene 6 | Gene 7 |
|---|---|---|---|---|---|---|
| Bar | FALDH_10 | — | — | — | — | — |
| Bar | FALDH_11 | — | — | — | — | — |
| Bar | HPS/PHI_a | — | — | — | — | — |
| Bar | Formolase | — | — | — | — | — |
| Bar | FALDH_9 | — | — | — | — | — |
| Bar | Formolase | DAK2_Yeast | — | — | — | — |
| Bar | Formolase | DAK_Cf | — | — | — | — |
| Bar | Formolase | DAK_Pp | — | — | — | — |
| Bar | Formolase | DAK_Ec | — | — | — | — |
| Bar | FALDH_11 | FDH_3 (Chloro) | — | — | — | — |
| Bar | FALDH_11 | FDH_3 (Cyto) | — | — | — | — |
| Bar | DAS_Canbo | DAK2_Yeast | — | — | — | — |
| Bar | DAS_Canbo | DAK_Cf | — | — | — | — |
| Bar | DAS_Canbo | DAK_Pp | — | — | — | — |
| Bar | DAS_Canbo | DAK_Ec | — | — | — | — |
| Bar | EaFALDH | FDH_3 (Chloro) | — | — | — | — |
| Bar | EaFALDH | FDH_3 (Cyto) | — | — | — | — |
| Bar | FALDH_9 | FDH_3 (Chloro) | — | — | — | — |
| Bar | FALDH_9 | FDH_3 (Cyto) | — | — | — | — |
| Bar | FALDH_10 | FDH_3 (Cyto) | — | — | — | — |
| Bar | FALDH_10 | FDH_3 (Cyto) | — | — | — | — |
| Bar | EaFALDH | — | — | — | — | — |
| Bar | Dummy | DAK2_Yeast | — | — | — | — |
| Bar | Dummy | DAK_Cf | — | — | — | — |
| Bar | Dummy | DAK_Pp | — | — | — | — |
| Bar | Dummy | DAK_Ec | — | — | — | — |
| Bar | Dummy | FDH_3 (Chloro) | — | — | — | — |
| Bar | Dummy | FDH_3 (Cyto) | — | — | — | — |
| hpt | TurboGFP | — | — | — | — | — |
| Bar | Dummy | FDH3_mito | — | — | — | — |
| Ba | EaFALDH | FDH3_mito | — | — | — | — |
| Bar | FALDH_9 | FDH3_mito | — | — | — | — |
| Bar | FALDH_10 | FDH3_mito | — | — | — | — |
| Bar | FALDH_11 | FDH3_mito | — | — | — | — |
| hpt | FALDH_10 | FDH_3 (Chloro) | — | — | — | — |
| hpt | FALDH_10 | FDH_3 (Cyto) | — | — | — | — |
| hpt | Formolase | DAK2_Yeast | — | — | — | — |
| hpt | Formolase | DAK_Cf | — | — | — | — |
| hpt | Formolase | DAK_Pp | — | — | — | — |
| hpt | Formolase | DAK_Ec | — | — | — | — |
| hpt | DAS_Canbo | DAK2_Yeast | — | — | — | — |
| hpt | DAS_Canbo | DAK_Cf | — | — | — | — |
| hpt | DAS_Canbo | DAK_Pp | — | — | — | — |
| hpt | DAS_Canbo | DAK_Ec | — | — | — | — |
| HPT | ANT1 | — | — | — | — | — |
| HPT | Delila | Rosea1 | — | — | — | — |
| HPT | GhPAP1 | — | — | — | — | — |
| HPT | AtPAP1 | — | — | — | — | — |
| HPT | P35S-eGFP | — | — | — | — | — |
| HPT | CrtW | CrtZ | — | — | — | — |
| HPT | PPvUbi2- | — | — | — | — | — |
| | eGFP | | | | | |
| HPT | PZmUbi1- | — | — | — | — | — |
| | eGFP | | | | | |
| HPT | HispS | H3H | Luz | CPH | — | — |
| HPT | VvMYBA5 | VvMYBA6 | — | — | — | — |
| HPT | ZmPl | ZmLc | — | — | — | — |
| HPT | DAS_Canbo | DHAK-2yeast | — | — | — | — |
| HPT | DAS_Canbo | DHAK-Ec | — | — | — | — |
| HPT | DAS_Canbo | DHAK-cf | — | — | — | — |
| Kana | DAS_Canbo | DHAK-2yeast | — | — | — | — |
| Bar | AtCaprice | — | — | — | — | — |
| Bar | AtStomagen | — | — | — | — | — |
| Bar | OsX1 | — | — | — | — | — |
| Bar | OsX2 | — | — | — | — | — |
| Bar | NtMyb23 | — | — | — | — | — |
| Bar | AtGlabra1 | — | — | — | — | — |
| Bar | FALDH-11 | FDH3_mito | — | — | — | — |
| Kana | DAS_Canbo | Dhak-PP | — | — | — | — |
| Kana | DAS_Canbo | DHAK-cf | — | — | — | — |
| Kana | DAS_Canbo | Dhak-ec | — | — | — | — |
| Bar | FALDH-9 | FDH3_mito | — | — | — | — |
| Bar | DAS_Canbo | DHAK-ec | — | — | — | — |
| BAR | DAS_Canbo | DHAK-cf | — | — | — | — |
| BAR | FALDH_10 | FDH3_mito | — | — | — | — |
| BAR | FALDH-11 | FDH3_cyto | — | — | — | — |
| Kana | TMOF_PM | — | — | — | — | — |
| KANA | TBUA1_Mp | — | — | — | — | — |
| KANA | P450_RR | — | — | — | — | — |
| KANA | Tmoa_SP | — | — | — | — | — |
| KANA | TOD_C1 | — | — | — | — | — |
| KANA | BMOA_PA | — | — | — | — | — |
| KANA | P450_2E1 | — | — | — | — | — |
| KANA | PHE_OH | — | — | — | — | — |
| KANA | Toua-SP | — | — | — | — | — |
| KANA | AtCaprice | — | — | — | — | — |
| KANA | AtStomagen | — | — | — | — | — |
| KANA | OsX1 | — | — | — | — | — |
| KANA | OsX2 | — | — | — | — | — |
| KANA | NtMyb123 | — | — | — | — | — |
| KANA | AtGlabra1 | — | — | — | — | — |
| KANA | AtGlabra2 | — | — | — | — | — |
| KANA | AtGlabra3 | — | — | — | — | — |
| HPT | TMOF_PM | — | — | — | — | — |
| HPT | Tbua1 | — | — | — | — | — |
| HPT | P450_RR | — | — | — | — | — |
| HPT | tmoa_SP | — | — | — | — | — |
| HPT | TOD_C1 | — | — | — | — | — |
| HPT | BMOA_PA | — | — | — | — | — |
| HPT | P450_2E1 | — | — | — | — | — |
| HPT | PHE_OH | — | — | — | — | — |
| HPT | toua_SP | — | — | — | — | — |
| HPT | HPS/PHIA | — | — | — | — | — |
| KANA | HPS/PHIA | — | — | — | — | — |
| BAR | HPS/PHIA | — | — | — | — | — |
| Bar | Formolase | — | — | — | — | — |
| Bar | EaZIP | — | — | — | — | — |
| NptII | HispS | H3H | Luz | CPH | — | — |
| NptII | Delila_mut | Rosea1_mut | — | — | — | — |
| NptII | Delila_mut | Rosea1_mut | — | — | — | — |
| NptII | EaZIP | — | — | — | — | — |
| NptII | Delila_mut | Rosea1_mut | — | — | — | — |
| NptII | Delila_mut | Rosea1_mut | — | — | — | — |
| HPT | AtStomagen | — | — | — | — | — |
| NptII | Delila_mut | Rosea1_mut | — | — | — | — |
| HPT | PvUbi1 + | — | — | — | — | — |
| | 3-eGFP | | | | | |
| HPT | TodC1 (Ea) | EaFALDH- | CrtW (Ea) | CrtZ (Ea) | HPS/PHI_Bm | AtStomagen |
| (Ea) | | IntF2a- | | | (Ea) | (Ea) |
| | | AtFDH1.3 (Ea) | | | | |
| HPT | TodC1 (Ea) | EaFALDH- | CrtW (Ea) | CrtZ (Ea) | — | — |
| (Ea) | | IntF2a- | | | | |
| | | AtFDH1.3 (Ea) | | | | |
| NptII | TodC1 (Ea) | EaFALDH- | CrtW (Ea) | CrtZ (Ea) | HPS/PHI_Bm | AtStomagen |
| | | IntF2a- | | | (Ea) | (Ea) |
| | | AtFDH1.3 (Ea) | | | | |
| NptII | TodC1 (Ea) | EaFALDH- | CrtW (Ea) | CrtZ (Ea) | — | — |
| | | IntF2a- | | | | |
| | | AtFDH1.3 (Ea) | | | | |
| HPT | CaMYBA | CaMYC (Ea) | — | — | — | — |
| | (Ea) | | | | | |
| HPT | FhMYB5 | FhTT8L (Ea) | — | — | — | — |
| | (Ea) | | | | | |

### Example 2: Modification of Epipremnum Aureum

[0491] This Example relates to the transformation of Epipremnum Aureum with vectors comprising sequences described herein.

### 1—Agrobacterium-Mediated Transformation

[0492] 1-1: Preparing material for transformation: young stem and petioles from young pothos were surface-sterilized with a sodium hypochlorite solution (2% chlorine) and a drop of Tween 20 for 25 min with agitation. Explants were then rinsed three times with sterile distilled water and cut into 0.5-1 cm long segments on MS medium (Murashige and Skoog 1962) supplemented with 2.0 mg 1-1N-phenyl-NO—1,2,3-thiadiazol5-yl urea (TDZ), 0.2 mg 1-1 a-naphthalene acetic acid (NAA), 3% sucrose, and 7 gr/L agar and adjusted to pH 5.8 (referred to herein as regeneration media (RM)).
[0493] 1-2: Agrobacterium preparation for the transformation of golden pothos: A. tumefaciens strain EHA105 containing a plasmid of interest was used for the transformation of golden pothos. The A. tumefaciens strain was grown in 5 ml of LB liquid medium supplemented with 50 mg/L spectinomycin and 30 mg/L rifamycin at 30 C until the absorbance at 600 nm reached 0.8-1.0. The strain was then transformed with a plasmid of interest (for Example, as represented by FIGS. 4 and 5). Plasmids used for transformation comprised a selection marker (e.g., hygromycin phosphotransferase gene driven by the 35S promoter). Following transformation, 25 mg/L hygromycin B was used as a selection agent in the regeneration media.
[0494] 1-3: Infection and Transformation: pre-cultured pothos stem explants were immersed for 20 minutes in an A. tumefaciens suspension with liquid medium (RM media without agar) supplemented with 0.1 mM acetosyringone, explants were occasional agitated to ensure exposure to A. tumefaciens.
[0495] 1-4: Co-Incubation: explants were then transferred onto an RM co-incubated media plate and stored for three days in a dark growth chamber at 26° C.
[0496] 1-5: Selection and embryogenesis: after co-cultivation, explants were rinsed three times with liquid medium, comprising 100 mg/L cefotaxime, 100 mg/L carbenicillin, and 30 mg/L hygromycin. Explants were then returned to a dark growth chamber kept at 26° C. Explants were transferred to fresh medium (RM) every 2-3 weeks to avoid oxidative products released from the hygromycin, these products can induce undesirable necrotic browning tissues. Embryogenic calli were readily observed after approximately 8-12 weeks of culture.
[0497] 1-6: Shoot generation: hygromycin-resistant embryos were transferred onto germination medium comprising MS-medium supplemented with 0.2 mg 1-1 NAA, 2 mg 1-1 6-benzylaminopurine (BAP), 3% sucrose, and 0.7% Agar (pH 5.8).
[0498] 1-7: Root generation and transfer to soil: germinated shoots were then transferred onto an MS medium supplemented with 1% sucrose (pH 5.8) in plant boxes for further growth of shoots and roots. Grown plants were transferred to soil to propagate under standard greenhouse conditions with a 16 h/8 h photoperiod at 25°/20° C. day/night, and 60% relative humidity.

### 2—Biolistic Transformation of Pothos

[0499] 2-1: Preparation of gold particles: for each shot transformation, 1.4-1.5 mg gold particles of 0.6 μm diameter (BioRad, Munich, Germany) were washed with 600 μL pure ethanol, then vortexed for 1 min and shortly centrifuged in a table-top microcentrifuge at 5,000 rpm. Supernatant was removed and particles were washed with 600 μL H2O. Washed gold particles were resuspended in 175 μL H2O and 2 mg of DNA comprising a plasmid of interest (for Example, as represented by FIGS. 4 and 5]), 175 μL CaCl2 (2.5 M stock) and 35 μL spermidine were added, and briefly mixed using a vortex. Suspensions were incubated for 10 minutes on ice and then briefly centrifuged using a table top microcentrifuge. Supernatant was then discarded, and the particle pellet was resuspended in 600 μL ethanol. The mixture was then centrifuged at 5,000 rpm for 1 second after which the supernatant was removed. The particle pellet was resuspended in 60 μL of pure ethanol and dropped (10 μL) on macrocarriers which were placed in the holes of the hepta-adaptor (BioRad). The macrocarriers and hepta-adaptor were sterilized with ethanol before use.
[0500] 2-2: Biolistic transformation: young leaves and petioles from young pothos plants were sterilized as described in section 1-1 above, and arranged onto the surface of a MS-solid medium comprising 2.0 mg TDZ and 0.2 mg NAA. Prepared explants were then bombarded with plasmid DNA coated onto the gold particles using the DuPont PDS—1000/He biolistic gun.
[0501] 2-3: Selection and embryogenesis: after transformation leaves were cut into small pieces (˜5×5 mm in size) and placed onto the surface of an MS-based supplement with 25 mg/L Hygromycin.
[0502] 2-4: Shoot and root generation and transfer to soil: steps as described above in section 1-6 and 1-7 were followed.

[0503] In certain cases, a new desirable gene and/or pathway is introduced into a golden pothos plant which is already transformed (e.g., a super-transformation transgenic event). The transformation method is the same as described in section 1 or section 2 of Example 2, except that explants are from pothos that is already transgenic rather than from wild type pothos. In order to select the super-transformation transgenic event, a new selection cassette and selection agent is used.

[0504] Using a method described herein, a pothos plant was transformed with a composition described herein (see FIG. 4, FIG. 5, FIG. 6, and FIG. 7, FIG. 8, and FIG. 9).

[0505] Exemplary constructs found in Table 3 were transformed into golden pothos.

TABLE 3
Exemplary Constructs Transformed Into Golden Pothos

| Gene 1 | Gene 2 | Gene 3 |
|---|---|---|
| hpt | FALDH_10 | FDH_3 (Chloro) |
| hpt | FALDH_10 | FDH_3 (Cyto) |
| hpt | Formolase | DAK2_Yeast |
| Bar | AtCaprice | — |
| Bar | AtStomagen | — |
| Bar | OsX1 | — |
| Bar | OsX2 | — |
| KANA | AtStomagen | — |
| KANA | OsX1 | — |
| KANA | NtMyb123 | — |
| KANA | AtGlabra1 | — |
| KANA | HPS/PHIA | — |
| BAR | HPS/PHIA | — |
| Bar | Formolase | — |

### Example 3: Demonstration of Heterologous Gene Expression in Epipremnum Aureum

[0506] This Example relates to the confirmation of heterologous gene expression in transformed Epipremnum aureum.

[0507] To confirm transgene introduction into Pothos, approximately 20-30 mg of transformed leaf pieces were collected and placed in a 1.5 mL Eppendorf tube containing 2 stainless steel beads of 3 mm diameter. The tube was then flash frozen in liquid nitrogen and introduced into a mixer mill (Retsch MM400) to lyse the samples (shaking at 30 Hz for 1 minute). Following lysis, 500 μL of GEx buffer was added (5.5 M Guanidine Thiocyanate, 20 nM Tris-HCl, pH 6.6) and the sample was vortexed vigorously. The samples were centrifuged for 5 minutes at 20,000 g and the supernatant was loaded on a Silica Membrane Mini Spin Column (from any DNA purification kit). The column with the sample was centrifuged at 20,000 g for 1 minute and the membranes were washed twice with 750 μL of cleaning buffer (80% ethanol, 10 mM Tris-HCl, pH 7.5). To remove any trace of ethanol, the samples were centrifuged at 20,000×g for 1 min and the genomic DNA was eluted by adding 50 μL of ddH2O to the column followed by centrifugation at 20,000×g for 1 min. The extracted genomic DNA was used in a PCR with primers specific to the transgene of interest (see Table 5) to confirm transgenesis.

[0508] PCR was conducted as known in the art. In brief, PCR conditions were as follow: in a 25 μL total reaction volume, 1 μL of DNA, 2.5 μL of 10× FastStart buffer with MgCl2 (Roche), 0.5 μL of 10 mM dNTP (Roche), 2.5 μL of forward primer at 10 mM, 2.5 μL of reverse primer at 10 mM, 0.2 μL of FastStart Taq (Roche, Cat. No. 12 032 937 001) and 15.8 μL of ddH2O. The cycling conditions of the PCR were optimized for each primer pair, but in general were as follows: 95° C. for 4 minutes, 35 cycles of: 95° C. for 30 seconds 55° C. for 30 and seconds 72° C. for 1 minute, 72° C. for 5 minutes, and hold at 12° C. The PCR products were analyzed on a 2.5% agarose gel stained with BET and the fragments size was compared to the known theoretical size using a DNA ladder as reference.

[0509] When a pothos plant was confirmed to have integrated a transgene, the transgenes expression level was tested and confirmed by qPCR. In general, qPCR was performed as known in the art, in brief: a leaf sample of 100 mg was taken and placed in a 1.5 mL Eppendorf tube containing 2 stainless steel beads of 3 mm diameter. The tube was then flash frozen in liquid nitrogen and introduced into a mixer mill (Retsch MM400) to lyse the samples (shaking at 30 Hz for 1 minute). RNA extraction was then performed with the Macherey Nagel NucleoSpin RNA Plant, Mini kit for RNA from plant, ref: 740949.50 (according to the manufacturer instructions). Once RNA was purified, qPCR reactions were set up using the NEB Luna® Universal One-Step RT-qPCR Kit (Ref: E3005 L). In a 5 μL total reaction volume, 2.5 μL of Luna Universal One-Step Reaction Mix (2×), 0.5 μL of Luna WarmStart® RT Enzyme Mix (20×), 0.2 μL of forward primer at 10 mM, 0.2 μL of reverse primer at 10 mM, 1 μL of RNA and 0.85 μL of nuclease-free water. Primer efficiency was tested using serial dilutions of the RNA (1 to 10,000 fold), all reactions were performed in at least triplicate. For each RNA sample, a pothos endogenous gene (actin) was used as the reference for calculating expression levels. The reaction was run on a LightCycler® 96 from Roche.

[0510] A skilled practitioner of the art will recognize that DNA and RNA extraction protocols, and PCR and qPCR reaction protocols can vary greatly while still producing valuable and informative data.

### Example 4: Air Purification by Transgenic Epipremnum Aureum

[0511] This Example relates to indoor air purification by technologies described herein, and the measurement of the same.

[0512] Method One (sentinels): A) a magnetic stir bar and stainless steel tripod are placed within a suitable air-tight container (e.g., a sealable glass jar) on top of a stir plate in a controlled environment; B) a product to be tested (e.g., a composition described herein) is placed within the suitable container, placed on top of the tripod in such a way that the stir bar is permitted to spin freely; C) a known and controlled amount of pollutant (e.g., VOC) is introduced into the suitable container; D) a custom built lid that contains at least one sensor for detecting a pollutant are comprised within the suitable container; E) the stir plate is activated to stimulate airflow, sensor outputs are logged every minute and pollutant concentrations over time are determined.

[0513] Method two (flow-through system): A) a stable pollutant gas source (e.g., a VOC) is created using a source tank and a permeation tube apparatus; B) a product to be tested is placed inside a suitable air-tight container (e.g., a sealable glass jar); C) the suitable air-tight container is sealed with a custom lid that comprises two pipes passing through it and into the air-tight container, one pipe is an inlet that extends to near the bottom of the jar, and one pipe is an outlet that is flush or near flush with the lid; D) at least one suitable pollutant sensor is calibrated; E) a suitable pollutant sensor measures the output concentration of volatile pollutant, while a suitable pollutant sensor (the same or an additional sensor) measures the input concentration of volatile pollutant; F) the concentration difference between output and input is measured.

[0514] Method three (DNPH derivatization cartridges for formaldehyde): A) a magnetic stir bar and stainless steel tripod are placed within a suitable air-tight container (e.g., a sealable glass jar) on top of a stir plate in a controlled environment; B) a product to be tested (e.g., a composition described herein) is placed within the suitable container, placed on top of the tripod in such a way that the stir bar is permitted to spin freely; C) a known and controlled amount of pollutant (e.g., VOC) is introduced into the suitable container; D) the suitable container is sealed using a lid fitted with a septum; E) a suitable period of time is allowed to pass (e.g., 3 hours); F) using a syringe and a needle, 50 ml of the jar contents is aspirated through a derivatization cartridge; F) the derivatization cartridge is extracted and injected into a suitable measurement device (e.g., an HPLC machine) following cartridge manufacturer's instructions.

[0515] Using methods described herein, a composition comprising a pothos plant and a microbiome was tested for volatile toluene metabolism (see FIG. 13). Using methods described herein, a composition comprising a pothos plant and a microbiome was tested for volatile benzene metabolism (see FIG. 14).

### Example 5: Identification and Characterization of Exemplary Microbiome Components

[0516] The current Example relates to discovery of and characterization of microbes suitable for microbiome colonization of certain compositions (e.g., plant tissues, and/or soil/media) described herein. There is little public data on Epipremnum aureum natural microbiome, in some embodiments, methods and compositions described herein are in part a product of detection and characterization of microbes suitable for Epipremnum aureum microbiome colonization. In some embodiments, suitable microbes are identified and isolated from certain plants or from polluted soils.

[0517] Host plants are collected from an environment (e.g., any environment, including but not limited to: an endemic region, a green house, or a stress promoting region). Plants aerial regions are conservatively washed to gently remove phyllosphere inhabiting microbes. A phyllosphere suspension is then serial diluted and incubated on various solid media that may be selective or nonselective, permitting growth of phyllosphere microbiome inhabitants of interest. Following or prior to aerial region washing, a host plants soil interfacing regions (e.g., roots) are incubated in an agitated suspension solution to create a soil and rhizosphere microbiome suspension. Such a suspension can be serially diluted, and aliquots are incubated on various solid and/or liquid media that may be selective or nonselective, permitting growth of soil and/or rhizosphere microbiome inhabitants of interest. Following at least a first aerial and/or root washing, host plants undergo a sterilizing wash (e.g., with soap) to remove any additional surface dwelling microbes. Host plants are then dissected, and sections are incubated on various solid media that may be selective or nonselective, permitting growth of endosphere dwelling microbes. Microbes from a phyllosphere, rhizosphere, soil, and/or endosphere are grown to a suitable stage, isolated, banked, and then characterized through genetic, (e.g., by 16S/ITS sequencing) and/or functional means (e.g., pollutant metabolism rates).

[0518] Leaves, soil, and roots are collected from a relatively polluted environment (e.g., near a hydrocarbon processing and/or dispensing site). Soil and roots are incubated in an agitated suspension solution to create a soil and rhizosphere microbiome suspension. Such a suspension can be serially diluted, and aliquots are incubated on various solid and/or liquid media that may be selective or nonselective, permitting growth of soil and/or rhizosphere microbiome inhabitants of interest. Leaves are conservatively washed to gently remove phyllosphere inhabiting microbes. A phyllosphere suspension is then serial diluted and incubated on various solid media that may be selective or nonselective, permitting growth of phyllosphere microbiome inhabitants of interest. Microbes from a phyllosphere, rhizosphere, and/or soil are grown to a suitable stage, isolated, banked, and then characterized through genetic, (e.g., by 16S/ITS sequencing) and/or functional means (e.g., pollutant metabolism rates).

[0519] Suitable microbes are detected and isolated using a bait technique. Soil is added to an outdoor container (e.g., a pot) in a well ventilated area, pollutants of interest, such as BTEX, formaldehyde, methanol, and/or various hydrocarbons are added to the soil, creating a selective media. The selective media (e.g., soil within a pot) is then enriched with at least one, but preferably as many as feasible, different unique soil samples to increase the microbial diversity found in the selective media. Pollutants of interest are added at regular intervals (e.g., every 12 hours, 24 hours, 48 hours, or 168 hours) during a suitable incubation period (e.g., 1 day, 5 days, 1 week, 2 weeks, 3 weeks, 4 weeks, 2 months, 4 months, 6 months, or 1 year). Following a suitable selection and incubation period, polluted soil is incubated in an agitated suspension solution to create a soil microbiome suspension. Such a suspension can be serially diluted, and aliquots are incubated on various solid and/or liquid media that may be selective or nonselective, permitting growth of soil microbiome inhabitants of interest. Microbes are then grown to a suitable stage, isolated, banked, and then characterized through genetic, (e.g., by 16S/ITS sequencing) and/or functional means (e.g., pollutant metabolism rates).

[0520] Suitable microbial consortia are detected and isolated as a population. Polluted soil is collected (e.g., from near a hydrocarbon processing and/or dispensing site), and placed immediately into an agitated solution of minerals and pollutant media. Additional nutrients and pollutants of interest are added at regular intervals (e.g., every 12 hours, 24 hours, 48 hours, or 168 hours) during a suitable incubation period (e.g., 1 day, 5 days, 1 week, 2 weeks, 3 weeks, 4 weeks, 2 months, 4 months, 6 months, or 1 year). Following a suitable selection and incubation period, microbial consortia are banked, and then characterized through genetic, (e.g., by 16S/ITS sequencing) and/or functional means (e.g., pollutant metabolism rates).

[0521] Host Epipremnum aureum plants were collected from a greenhouse environment. Plants were conservatively washed to gently remove phyllosphere inhabiting microbes. A phyllosphere suspension was then serial diluted and incubated on various nonselective solid, permitting growth of phyllosphere microbiome inhabitants of interest. Following aerial region washing, a host Epipremnum aureum plants soil interfacing regions (e.g., roots) was incubated in an agitated suspension solution to create a soil and rhizosphere microbiome suspension. Such a suspension was then serially diluted, and aliquots were incubated on various solid and/or liquid media that was either selective or nonselective, permitting growth of soil and/or rhizosphere microbiome inhabitants of interest. Following a first aerial and then root washing, host plants underwent a sterilizing wash (e.g., with soap) to remove any additional surface dwelling microbes. Host plants were then dissected, and sections were incubated on various solid media that was selective or nonselective, permitting growth of endosphere dwelling microbes. Microbes from a phyllosphere, rhizosphere, soil, and/or endosphere were grown to a suitable stage, banked, and then characterized, e.g., by 16S/ITS sequencing. In an exemplary extraction, 43 strains of potential microbiome inhabitants were collected, 21 soil and root epiphytes, 18 endophytes, and 4 leaf epiphytes.

[0522] Leaves, soil, and roots were collected from a relatively polluted environment (e.g., near a hydrocarbon dispensing site). Soil and roots were incubated in an agitated suspension solution to create a soil and rhizosphere microbiome suspension. Such a suspension was serially diluted, and aliquots were incubated on various solid and/or liquid media that was either selective or nonselective, permitting growth of soil and/or rhizosphere microbiome inhabitants of interest. Leaves were conservatively washed to gently remove phyllosphere inhabiting microbes. A phyllosphere suspension was then serial diluted and incubated on various solid media that were either selective or nonselective, permitting growth of phyllosphere microbiome inhabitants of interest. Microbes from a phyllosphere, rhizosphere, and/or soil were grown to a suitable stage, banked, and then characterized, e.g., by 16S/ITS sequencing. In an exemplary extraction, 12 strains of potential microbiome inhabitants were collected, 8 soil and root epiphytes, and 4 leaf epiphytes.

### Example 6: Microbe Pollutant Metabolism Characterization

[0523] The current Example relates to the characterization of metabolic functions in compositions and methods described herein.

[0524] Microbes are tested and characterized using a pollutant (e.g., formaldehyde etc.) as the sole carbon source(s). Said pollutant is dissolved in water, and mineral media (MMB/MP). Various ranges of pollutant are utilized (e.g., 2 mM, 4 mM, 6 mM, 8 mM, 10 mM, or greater than 10 mM), and microbe growth is monitored through regular optical density measurements (e.g., daily measurements of OD600). Concurrently, microbes that act as a positive control can be grown with glucose (MMB), or methanol (MP) media.

[0525] Tests are carried out in at least duplicate (e.g., duplicate, triplicate, or more) in glass tubes comprising at least 5 mL of mineral media (MP) with loose caps to facilitate oxygen exchange (formaldehyde stayed in solution). At a suitable time interval (e.g., every 12 hours, every 24 hours, every 48 hours, etc.), an appropriate volume of culture (e.g., 50 μL of culture) is sampled and added to a spectrophotometry plate, where an appropriate volume of perchloric acid (e.g., 50 μL) and an appropriate volume of NASH reagent (e.g., 100 μL) are added. The plate is incubated at an appropriate temperature (e.g., about 60° C.) for a suitable period of time (e.g., about 5 minutes) and immediately read in a spectrophotometer (e.g., a Biotek Epoch2) at an appropriate wavelength (e.g., at 400 nm). The absorbance levels of a control series of known formaldehyde concentrations is done in parallel to allow correlation of absorbance and formaldehyde concentration.

[0526] Microbes are tested and characterized using a pollutant (e.g., BTEX, etc.) as a sole carbon source(s). Microbes are streaked, placed, or spotted onto suitable growth media (e.g., minimal media agar plates) and incubated in an air-tight chamber. Various ranges of pollutant (e.g., BTEX, etc.) are added to said chamber either together or alone (e.g., 2 mM, 4 mM, 6 mM, 8 mM, 10 mM, or greater than 10 mM), and microbe growth is qualitatively and/or quantitatively assessed visually at regular intervals during a suitable incubation period. Concurrently, microbes that act as a positive control can be grown with glucose or methanol as the carbon source.

[0527] Opportunist methylotrophic microbes were from isolated from plants and/or soil as described in Example 7. Methylotrophic microbes (e.g., “Mc8”) were incubated using formaldehyde as the sole carbon source. Formaldehyde was dissolved in water, and mineral media (MMB/MP) at various concentrations (e.g., 2 mM, 4 mM, 6 mM), with control microbes grown using methanol as the carbon source (e.g., CM1% representing 1% methanol in the media as the sole carbon source).

[0528] Methylobacterium oryzae CBMB20 were obtained or evolved (described in Example 7) and said microbes formaldehyde biodegradation rates were assayed in triplicate in glass tubes comprising at least 5 mL of mineral media (MP) with loose caps to facilitate oxygen exchange. Every 12 hours, 50 μL of culture was sampled and added to a spetrophotometry plate, where 50 μL of perchloric acid, and 100 μL of NASH reagent were added. The plate was incubated at about 60° C. for about 5 minutes and immediately read in a spectrophotometer (e.g., a Biotek Epoch2) at a wavelength of 400 nm. The absorbance levels of a control series of known formaldehyde concentrations was done in parallel to allow correlation of absorbance and formaldehyde concentration. Results are shown in FIG. 11 and FIG. 12.

[0529] Microbes isolated from plants and/or soil as described in Example 7 were tested and characterized using a pollutant (e.g., BTEX) as the sole carbon source(s). Microbes were streaked or spotted onto suitable growth media (e.g., minimal media agar plates) and incubated in an air-tight chamber. BTEX was added to said chamber at 2 mM each. Microbes were grown for two weeks, and growth was qualitatively assessed visually, the results of which are depicted in Table 4.

TABLE 4
Microbial Isolates Growth on BTEX

| Isolate | Origin | Growth (qualitative) |
|---|---|---|
| Pi6 | Pothos Leaf Endophyte | |
| Pi8 | Pothos Shoot Epiphyte | Faint |
| Pi12 | Pothos Shoot Endophyte | Faint |
| Pi16 | Pothos Root Endophyte | Faint |
| Pi17 | Pothos Root Endophyte | Very Faint |
| Pi18 | Pothos Root Endophyte | Yes |
| Pi19 | Pothos Root Epiphyte | Faint |
| Pi24 | Pothos Root Endophyte | Yes |
| Pi27 | Pothos Root Endophyte | Yes |
| Pi32 | Pothos Root Epiphyte | Yes |
| Pi35 | Pothos Leave Epiphyte | Faint |
| Pi36 | Pothos Root Epiphyte | Faint |
| Pi37 | Pothos Root Endophyte | Very Faint |
| Pi38 | Pothos Root Endophyte | Very Faint |
| Pi39 | Pothos Root Endophyte | Yes |
| Pi40 | Pothos Root Endophyte | Yes |
| Pi41 | Pothos Root Epiphyte | Very Faint |
| Pi42 | Pothos Root Epiphyte | Faint |
| SS2_1 | Polluted Soil | Faint |
| SS2_2 | Polluted Soil | Faint |

[0530] Fungal strains were obtained from the Fungal Biodiversity Center (CBS) and were tested and characterized using a pollutant (e.g., Benzene, Toluene, or Xylene) as the sole carbon source. Microbes were placed as plugs onto suitable growth media (e.g., minimal media agar plates) and incubated in an air-tight chamber. Benzene, Toluene, or Xylene was added to each respective chamber at 5 mM. Microbes were grown for one month, and growth was quantitatively assessed visually, the results of which are depicted in Table 5.

TABLE 5
Select Fungal Strain Radial Growth
on Benzene, Toluene, or Xylene.

| | | Radial Growth (mm) | | |
|---|---|---|---|---|
| Strain | Organism | Benzene | Toluene | Xylene |
| Ex110555 | Exophiala | 4 | 4 | 4 |
| (CBS110555) | xenobiotica | | | |
| Ex117754 | Exophiala | 6 | 5 | 1 |
| (CBS117754) | xenobiotica | | | |
| Hr176.62 | Hormoconis | 2 | 2 | 2 |
| (CBS177.62) | resinae | | | |
| Hr177.62 | Hormoconis | 1 | 1 | 1 |
| (CBS177.62) | resinae | | | |
| 1C1i110551 | Cladophialophora | 0.25 | 0.15 | 0.08 |
| (CBS110551) | immunda | | | |
| Cp0.110553 | Cladophialophora | 6 | 12 | 6 |
| (CBS110553) | psammophila | | | |
| Cs114326 | Cladosporiulm | — | — | — |
| (CBS114326) | sphaerospermum | | | |
| Pr291.30 | Picnidiella | 3 | 3 | 3 |
| (CBS291.30) | resinae | | | |
| Pv115145 | Paecilomyces | 1 | 3 | 1 |
| (CBS115145) | variotii | | | |
| Pz110552 | Pseudoeurotium | 2 | 2 | 3 |
| (CBS110552) | zonatum | | | |

### Example 7: Directed Evolution of Microorganisms

[0531] The current Example relates to directed evolution of, random mutagenesis of, and/or characterization of microbes suitable for microbiome colonization of certain compositions (e.g., plant tissues, and/or soil/media) described herein. Such a process of directed evolution may comprise a step-by-step increase of selective pressure. Such a process may occur manually, or may be performed using an automated system (e.g., the Chi.bio aka Morpheus system).

[0532] Optionally, prior to directed evolution, a microbial species and/or strain of interest may undergo a preliminary characterization for pollutant metabolism characteristics, e.g., Formaldehyde and/or BTEX biodegradation characteristics as described in Example 8.

[0533] In some methods comprising directed evolution, microbes of interest (e.g., those described herein) are serially inoculated in a series of liquid media (e.g., liquid mineral media (MMB/MP)) that have incremental increases in pollutant concentrations (e.g., Formaldehyde, and/or BTEX etc.). In some embodiments, increases in pollutant concentration occur at known levels (e.g., 2 mM, 4 mM, 6 mM, 8 mM, or 10 mM steps). Microbes may be inoculated and incubated with optimal growth medium (e.g., containing a carbon source) with added pollutants (e.g., Formaldehyde, and/or BTEX etc.). Alternatively, microbes may be inoculated and incubated with minimal growth medium (e.g., without a carbon source) with added pollutants (e.g., Formaldehyde, and/or BTEX etc.) acting as the sole carbon source. Pollutant concentrations start at or above the last known tolerance for a particular microbial strain; following inoculation, microbes are incubated until growth appears. In some methods of directed evolution, an optional mutagenesis step (e.g., UV mutagenesis) occurs before and/or during an inoculation in a stepwise pollution concentration increasing media. Following growth appearance, microbes are permitted to expand exponentially, and microbes of interest with potential biodegradation capabilities are were singled (e.g., by streaking on rich medium (CASO) with or without continued selective pressure), selected, isolated and banked for future use and/or characterization. In some methods, such a process may be repeated as many times as desired (e.g., 3, 6, 9, 12, 15, 20, 25, 30, etc.), or until a pollutant concentration is reached that completely inhibits microbial growth.

[0534] Following a stepwise round of inoculations (e.g., after 1 round, 2 rounds, 3 rounds, 4 rounds, 5 rounds, 6 rounds, 7 rounds, 8 rounds, 9 rounds, 10 rounds, 11 rounds, 12 rounds, 13 rounds, 14 rounds, 15 rounds, or more than 15 rounds; there is no limit on the number of rounds that can be performed), microbes can be isolated for characterization of their potential pollutant metabolism characteristics, e.g., Formaldehyde and/or BTEX biodegradation characteristics as described in Example 6. These characteristics can then be compared with a preliminary and/or prior characterization. Microbes with improved biodegradation characteristics are produced.

[0535] Prior to directed evolution, microbial species/strain Methylobacterium extorquens PA1, and Methylobacterium oryzae CBMB20 underwent a preliminary characterization for pollutant metabolism characteristics, e.g., VOC biodegradation characteristics as described in Example 6 (e.g., as found in Table 4, Table 5, Table 6, and Table 7).

[0536] Microbial species/strain Methylobacterium extorquens PA1, and Methylobacterium oryzae CBMB20 were serially inoculated in a series of liquid media (e.g., liquid mineral media (MMB/MP)) that had incremental increases in pollutant concentrations e.g., formaldehyde. Increases in pollutant concentration occurred at known levels (e.g., 2 mM, 4 mM, 6 mM, 8 mM, or 10 mM steps). Microbes were inoculated and incubated with minimal growth medium (e.g., without a carbon source) with added pollutants (e.g., Formaldehyde) acting as the sole carbon source. Pollutant concentrations started at or above the last known tolerance for each particular microbial strain (see Table 6); following inoculation, microbes were incubated until growth appeared. Two experimental approaches were taken, one series of pollutant concentration increases were performed without an exogenously supplied mutagen, while another series of pollutant concentration increases were performed with an exogenously supplied mutagen (e.g., UV mutagenesis). Following growth appearance, microbes were permitted to expand exponentially, and microbes of interest with potential biodegradation capabilities were singled by streaking on rich medium (CASO), selected, isolated, and banked for future use and/or characterization. Such a process was repeated at least 9 or 10 times respectively (see Table 6), and continued directed evolution can occur. Exemplary formaldehyde biodegradation performed by a Methylobacterium oryzae CBMB20 strain evolved through 4 rounds of inoculation is shown in FIG. 11 (measured using a recurrent NASH assay as described in Example 6). Such a strain had a maximum tolerance to formaldehyde of 12 mM, significantly higher than the 4 mM concentration tolerated by the strain prior to directed evolution.

TABLE 6
Select Microbial Strain Directed Evolution
for Formaldehyde Biodegradation.

| | Methylobacterium | Methylobacterium |
|---|---|---|
| | extorquens PA1 | oryzae CBMB20 |
| Initial CH20 | 6 mM | 4 mM |
| Tolerance (mM) | | |
| Rounds of Directed Evolution (DE) | 10 | 9 |
| Maximum CH₂O Tolerance after | 40 mM (6.7X) | 30 mM (7.5X) |
| DE without UV mutagenesis | | |
| Maximum CH₂O Tolerance after | 36 mM (6X) | 28 mM (7X) |
| DE with UV mutagenesis | | |

[0537] Microbial species/strain Pseudomonas putida F1, and SS2_4 (isolated herein) were serially inoculated in a series of liquid media (e.g., liquid mineral media (MMB/MP)) that had incremental increases in pollutant concentrations e.g., Benzene, Toluene, or Xylene. Increases in pollutant concentration occurred at known levels (e.g., 2 mM, 4 mM, 6 mM, 8 mM, or 10 mM steps). Microbes were inoculated and incubated with minimal growth medium (e.g., without a carbon source) with added pollutants (e.g., Benzene, Toluene, or Xylene.) acting as the sole carbon source. Pollutant concentrations started at or above the last known tolerance for each particular microbial strain (see Table 7); following inoculation, microbes were incubated until growth appeared. A series of pollutant concentration increases were performed without an exogenously supplied mutagen. Following growth appearance, microbes were permitted to expand exponentially, and microbes of interest with potential biodegradation capabilities were selected (performed using growth media with low level atmospheric BTEX concentrations (5 mM)), isolated, and banked for future use and/or characterization. Such a process was repeated at least 5, 6, 7, 8, 9, 10, 11, 12, or more times respectively (see Table 7), and continued directed evolution can occur.

TABLE 7
Select Microbial Strain Directed Evolution
for Formaldehyde or BTEX Tolerance

| | | Initial | | Current |
|---|---|---|---|---|
| | | tolerance | Rounds of | tolerance |
| Strain | Carbon source | (mM) | DE | (mM) |
| Pseudomonas | Benzene | 14 | 10 | 26 |
| putida F1 | Toluene | 6 | 8 | 38 |
| | Xylene | 58 | 10 | 80 |
| Methylobacterium | Formaldehyde | 6 | 12 | 43 |
| extorquens PA1 | | | | |
| Methylobacterium | Formaldehyde | 4 | 10 | 33 |
| oryzae CBMB20 | | | | |

### Example 8: Horizontal Transfer of Beneficial Genes

[0538] The current Example relates to the discovery of genetic loci causative of pollutant biodegradation phenotypes, and the subsequent horizontal transfer of said genes to alternative microbiome components.

[0539] An evolved strain is created as described in Example 7. Following and/or during phenotypic analysis, underlying genetic modifications are identified using an appropriate sequencing technique (e.g., full genome sequencing, whole exome sequencing, selective loci sequencing, etc.). Evolved strains genetic background are compared to wild type strains, and evolved sequences are identified. Evolved sequences are isolated and cloned for further analysis. Certain evolved sequences may provide desirable phenotypes such as efficient pollutant biodegradation and/or metabolism. Evolved sequences may be introduced to other microbial species through the process of horizontal gene transfer as is known in the art.

[0540] An environmental sample is taken from a location that may have microbes with relevant metabolic activities. In some cases, populations of microbes that may have desirable phenotypes such as efficient pollutant biodegradation and/or metabolism may be missed during sampling protocols as outlined in Example 5, as said microbes may not be amenable to culturing. Such an environmental sample can be analyzed using metagenomics, e.g., the genomic profiling of the entire sample without and/or with minimal intermediate culturing steps or manipulation. Metagenomics profiling is performed using next-generation sequencing technologies (e.g., Illumina based shotgun sequencing, Illumina MiSeq, etc.) coupled with metagenome assembly tools (e.g., SOAPdenovo2, MOCAT, MetAMOS, SPAdes Assembler, Check-M, Harvest, MUMmer, Prokka, MLST_Check, etc.), and annotation where necessary. Alternatively or in tandem, metagenomics analysis is performed using 16S/ITS sequencing to identify phylogenetic relationships. Metagenomic analysis facilitates identification of previously non-isolated strains that may be of interest. Following identification of sequences of interest, microbes can be resampled using optimized collection and/or culturing techniques, or sequences of interest can be cloned using synthetic biology.

[0541] Samples are obtained from a variety of common house plants, in a variety of conditions (e.g., well maintained, poorly maintained, with other plants, in isolation etc.). Samples are taken from plant surfaces, tissues, and soils as described in Example 6. New strains are identified that may comprise genes that bestow phenotypic characteristics of interest (e.g., efficient pollutant biodegradation), and/or strains are identified that are considered hardy and/or non-pathogenic that are amenable to horizontal gene transfer. Genes of interest can be identified, and either cloned or created using synthetic biology.

[0542] Wild type and evolved strains are co-cultured with or without slight or stringent selective pressure. In cases where an evolved strain has lost fitness when compared to a wild type strain, co-culturing and/or co-cultivation can permit natural horizontal gene transfer and creation of an intermediate hybrid strain that may provide certain evolved and wild type characteristics. In some cases, wild type strains are provided with lysed evolved strains and/or isolated evolved strain genetic information. In certain embodiments, wild type strains are transformed with certain evolved sequences, rendering a wild type strain engineered and potentially providing a wild type strain with certain evolved and desirable characteristics (e.g., efficient pollutant biodegradation).

### Example 9: Plant-Microorganism Interface and Microbiome Management

[0543] The current Example relates to the interaction between compositions described herein, e.g., between plants and their microbiome.

[0544] A microorganism of interest is identified and/or created (e.g., see Examples 5-8). Said microbe is suspended in a suitable solution (e.g., MgSO4 10 mM with Tween 20 at 0.01%) and inoculated onto a naïve plant (e.g., through submersion, spraying or other suitable method) and/or a suitable media (e.g., soil, hydroponic water, activated charcoal, a container etc.). An inoculated plant is visually monitored for a suitable period of time (e.g., 1 day, 2 days, 1 week, 2 weeks, 4 weeks, 2 months, 6 months, 1 year, etc.) for microbe induced symptoms (e.g., necrosis, growth defects, etc.). An inoculated plant is tested for pollutant biodegradation (e.g., formaldehyde, methanol, and/or BTEX etc.), and kinetics of pollutant biodegradation within an air-tight enclosure are measured using an integrated formaldehyde, methanol, and/or BTEX sensor capable of monitoring a pollutant's concentration over time. Long term survival and colonization of a plant by a newly introduced microbe are measured, where a microbe of interest is re-isolated (e.g., as described in Example 5) after a suitable period of time (e.g., 1 week, 2 weeks, 4 weeks, 2 months, 6 months, 1 year, etc.). A microbe of interest is selected for by inoculating isolates in mineral media comprising a known stringent concentration of pollutant (e.g., maximum pollutant tolerance level as described in Example 8). Long term survival and colonization of a plant by a newly introduced microbe is confirmed. A stable interaction is formed.

[0545] A composition of interest (e.g., a plant, a microbe, and/or a combination thereof) is placed within an air-tight container, where a plant stem passes through a PTFE septum. Such a system facilitates pollutant degradation assessment performed by a plants aerial organs and/or a plants phyllosphere.

[0546] A plant and microbe combination can have an enhanced microbiome. Such an enhanced microbiome can comprise an engineered microbe coupled with compounds useful for bacterial growth and/or stabilization of growth conditions (e.g., pH optimization, heavy metals availability, F/BTEX degradation elicitors, selection against other bacterial populations etc.).

[0547] Certain microbes described herein that are shown to improve a depollution capacity of various indoor plants, (e.g., MePA1, MoCBM, PpF1 and/or SS2-2) were not directly isolated from Pothos. In certain cases, such a plant and microbe interaction is likely not specific, and such a microbe may be amenable for compositions comprising a plant other than Pothos. Alternatively, a composition can be produced that includes such a microbe without a host plant. Such a composition can be administered to a variety of indoor plants as a supplement.

[0548] Microorganism of interest such as MePA1 MePA1, MoCBM, PpF1 and/or SS2-2, were identified and/or created (e.g., see Examples 5-8). Said microbes were individually suspended in a suitable solution (e.g., MgSO4 10 mM with Tween 20 at 0.01%) and inoculated onto a naïve plant (e.g., through spraying). An inoculated plant was visually monitored for a suitable period of time (e.g., up to 6 months) for microbe induced symptoms (e.g., necrosis, growth defects, etc.). Microbes were qualitatively found to be non-toxic. An inoculated plant was tested for pollutant biodegradation (e.g., formaldehyde, methanol, and/or BTEX etc.), and kinetics of pollutant biodegradation within an air-tight enclosure were measured using an integrated formaldehyde, methanol, and/or BTEX sensor capable of monitoring a pollutant's concentration over time. Long term survival and colonization of a plant by a newly introduced microbe was measured, where a microbe of interest was re-isolated (e.g., as described in Example 5) after a suitable period of time (e.g., 2 week, 4 weeks, 6 weeks, 9 weeks, and 12 weeks). A microbe of interest was selected for by inoculating isolates in mineral media comprising a known stringent concentration of pollutant (e.g., maximum pollutant tolerance level as described in Example 6 and Example 7). Long term survival and colonization of a plant by a newly introduced microbe was confirmed. A stable interaction was formed (see Table 8).

TABLE 8
Select Microbial Strain Directed Evolution
for Formaldehyde Biodegradation.

| | | Post-Inoculation Resampling for Strain Presence | | | | |
|---|---|---|---|---|---|---|
| Strain | Substrate | 2 weeks | 4 weeks | 6 weeks | 9 weeks | 13 weeks |
| MePA1 | Soil | Yes | Yes | Yes | Yes | Yes |
| | Leaves | NA | Yes | No | No | No |
| MoCBM | Soil | Yes | Yes | Yes | No | No |
| | Leaves | NA | Yes | No | No | No |
| PpF1 | Soil | Yes | Yes | Yes | Yes | Yes |
| | Leaves | No | No | No | No | No |
| SS2_4 | Soil | Yes | Yes | Yes | Yes | Yes |
| | Leaves | Yes | Yes | No | No | No |

[0549] An inoculated plant was tested for pollutant biodegradation (e.g., benzene), and the kinetics of pollutant biodegradation were measured using an air-tight enclosure with an integrated formaldehyde and/or BTEX sensor capable of monitoring a pollutant's concentration over time (e.g., as described in Example 4). Benzene concentration (ppm) was measured in closed containers comprising plants with evolved microbiomes compared to those with a native microbiome. Plants with an evolved microbiome showed significant reductions in aerosolized benzene when compared to control plants with a native microbiome (See FIG. 14A).

[0550] An inoculated plant was tested for pollutant biodegradation (e.g., toluene), and the kinetics of pollutant biodegradation were measured using an air-tight enclosure with an integrated formaldehyde and/or BTEX sensor capable of monitoring a pollutant's concentration over time (e.g., as described in Example 4). Toluene concentration (ppm) was measured in closed containers comprising plants with evolved microbiomes compared to those with a native microbiome. Plants with an evolved microbiome showed an ability to significantly reduce aerosolized toluene when compared to control plants with a native microbiome (See FIG. 13A).

### Example 10: Characterization of Microbes

[0551] The present Example confirms that, as described herein, plants (e.g., Epipremnum aureum plants) inoculated with microbes may have enhanced pollutant (e.g., formaldehyde, benzene, toluene, and/or xylene) phytoremediation, e.g., as compared to an appropriate reference (e.g., plants with a native microbiome).

[0552] Concentrated microbes (e.g., Pseudomonas putida F1 (PpF1)) identified, as described, in Example 5-9 were prepared in a low volume (see Table 9) and suspended in a suitable solution (e.g., MgCl2). Under continuous lights, a plant (e.g., Epipremnum aureum) was inoculated with the concentrated microbe (e.g., PpF1) solution and the solution was poured on the soil of the potted plant (e.g., Epipremnum aureum). The controls (e.g., plants with a native microbiome) were given the same volume of the suitable solution (e.g., MgCl2) without microbial cultures.

[0553] An inoculated plant was tested for pollutant (e.g., formaldehyde, benzene, toluene, and/or xylene) biodegradation, and the kinetics of pollutant biodegradation were measured using an air-tight enclosure with an integrated formaldehyde and/or BTEX sensor capable of monitoring a pollutant's concentration over time (e.g., as described in Example 4)

TABLE 9
Experimental Conditions for Bacteria Concentration

| | Volume of | OD in a |
|---|---|---|
| Pollutant | Concentrated | suitable solution |
| Experiment | Microbe | (e.g., MgCL2) |
| Benzene | 10 mL | 11.6 |
| Toluene | 10 mL | 11.6 |
| Xylene | 5 mL | 34.6 |
| Formaldehyde | 1 mL | 10 |

[0554] Among other things, the present Example demonstrates that a plant (e.g. Epipremnum aureum plant) with an evolved microbiome (e.g., PpF1) may have enhanced pollutant (e.g., Benzene, Toluene, and/or Xylene) phytoremediation, e.g., as compared to an appropriate reference (e.g., plant with a native microbiome) (FIG. 13B, FIG. 14B, and/or FIG. 15). Specifically, in this Example, inoculation of a plant (e.g. Epipremnum aureum plant) with a microbe (e.g., PpF1) increased pollutant (e.g., Benzene, Toluene, and/or Xylene) degradation speed by at least 9×, e.g., as compared to an appropriate reference (e.g., plants with a native microbiome) (FIG. 13B, FIG. 14B, and/or FIG. 15). In some embodiments, a plant (e.g. Epipremnum aureum plant) with a microbe (e.g., PpF1) may exhibit increased pollutant (Benzene, Toluene, and/or Xylene) phytoremediation within 12 hours, 24 hours, 48 hours, and/or 60 hours (FIG. 13B, FIG. 14B, and/or FIG. 15). In some embodiments, a plant (e.g. Epipremnum aureum plant) with a microbe identified as in Examples 5-9 may have enhanced pollutant (e.g., formaldehyde, benzene, toluene, ethylbenzene and/or xylene) phytoremediation, e.g., as compared to an appropriate reference (e.g., plants with a native microbiome).

[0555] In another experiment, pollutant (e.g., formaldehyde) degradation was measured using plants (e.g. Epipremnum aureum plants) inoculated with concentrated microbes (e.g., Methylobacterium extorquens PA1 (MePA1), Methylobacterium oryzae CBMB20 (MoCBM) and/or Pseudomonas putida F1 (PpF1)) identified in Example 5-9. The concentrated microbes (e.g., Methylobacterium extorquens PA1 (MePA1), Methylobacterium oryzae CBMB20 (MoCBM) and/or Pseudomonas putida F1 (PpF1)) were prepared in a low volume (see Table 9) and suspended in suitable solution (e.g., MgCl2).

[0556] Among other things, the present Example further demonstrates that plants (e.g. Epipremnum aureum plants) inoculated with concentrated microbes may have enhanced pollutant (e.g., formaldehyde) phytoremediation, e.g., as compared to an appropriate reference (e.g., plants with a native microbiome) (FIG. 16). Specifically, in this Example, as demonstrated in FIG. 16, inoculation of a plant (e.g. Epipremnum aureum plant) with MoCBM, PpF1, or MePA1 increased pollutant (e.g., formaldehyde) degradation speed by at least 3.2×, 5.1×, and 5.2× respectively, e.g., as compared to an appropriate reference (e.g., plants with a native microbiome). In some embodiments, as demonstrated in FIG. 16, Epipremnum aureum plants inoculated with an evolved microbiome (e.g., MoCBM, PpF1, and/or MePA1) may exhibit increased pollutant (e.g., formaldehyde) phytoremediation within 1 hour, 2 hours, 3 hours, and/or 4 hours post inoculation e.g., as compared to an appropriate reference (e.g., plants with a native microbiome).

[0557] In some embodiments, Epipremnum aureum plants inoculated with an evolved microbiome (e.g., MoCBM, PpF1, and/or MePA1) may exhibit increased pollutant (e.g., benzene, toluene, ethylbenzene and/or xylene) phytoremediation e.g., as compared to an appropriate reference (e.g., plants with a native microbiome).

### Example 11: Stability of Engineered Microbes

[0558] The present Example confirms that, as described herein, engineered microbiome may enhance pollutant biodegradation (e.g., toluene) of a plant (e.g., Epipremnum aureum) over an extended period (e.g., several weeks) as compared to an appropriate reference (e.g, plants with a native microbiome).

[0559] Plants (e.g. Epipremnum aureum plants) were inoculated with mature cultures of microbes (e.g., 1Cli110551 (CBS110551) and/or Cp0.110553 (CBS110553)) on agar plates. The mycelium was gathered using a spatula to minimize the amount of agar media. The mycelium was placed in a falcon containing 20 tungsten beads and 20 mL of 10 mM MgCl2, and then disrupted for 15 minutes on a vortex at moderate setting. Once disrupted, 10 mL of the mycelium culture was added to a potted Epipremnum aureum. The toluene phytoremediation capacity of the resulting plants were measured at 24 hours (FIG. 17A), 1 week (FIG. 17B), 2 weeks (FIG. 17C) and 4 weeks (FIG. 17D) post-inoculation.

[0560] Among other things, the present Example demonstrates that plants (e.g., Epipremnum aureum plants) with engineered microbiomes may have enhanced pollutant (e.g., toluene) biodegradation over an extended period (e.g., several weeks) as compared to an appropriate reference (e.g., plants with a native microbiome) (FIG. 17A-D). In some embodiments, as demonstrated in FIGS. 17A-D, an engineered microbe (e.g., 1C1i110551 (CBS110551) and/or Cp0.110553 (CBS110553)) may enhance pollutant (toluene) biodegradation of a plant for at least 1 week, 2 week, 3 week, and/or 4 weeks e.g., as compared to an appropriate reference (e.g., plants with a native microbiome). In some embodiments, as demonstrated in FIGS. 17A-D, pollutant (e.g., toluene) degradation speed was increased by at least by 4.6× and 4.9× after 24 h, 3× and 2.4× after 1 week, 2.5× and 2× after 2 weeks, 2.5× and 2.8× after 4 weeks, post-inoculation of Epipremnum aureum with 1C1i110551 (CBS110551) and Cp0.110553 (CBS110553) respectively, e.g., as compared to an appropriate reference (e.g., plants with a native microbiome). In some embodiments, as demonstrated in FIG. 17A, an engineered microbe (e.g., 1C1i110551 (CBS110551) and/or Cp0.110553 (CBS110553))) may enhance pollutant (toluene) biodegradation of a plant within 9 hours post inoculation e.g., as compared to an appropriate reference (e.g., plants with a native microbiome).

[0561] In some embodiments, Epipremnum aureum plants with engineered microbiomes, as described herein, may increase pollutant biodegradation (e.g., benzene, ethylbenzene, xylene, and/or formaldehyde) over an extended period (e.g. several weeks) e.g., as compared to an appropriate reference (e.g., plants with a native microbiome).

### Example 12: Pollutant Phytoremediation of Transgenic Plants

[0562] The present Example confirms that, as described herein, transgenic plants comprising a gene of interest may have enhanced pollutant (e.g., formaldehyde and/or BTEX) phytoremediation as compared to a reference (e.g. a non-transgenic plant). Among other things, and as discussed herein, the present disclosure provides an insight that synthetic metabolic pathways (e.g., as disclosed herein) may be applied to (e.g., engineered into) plants, and specifically into ornamental plants. Without wishing to be bound by any theory, the present disclosure proposes that such, metabolic pathways may affect central metabolism pathways that are conserved between or among plant species.

[0563] The present Example demonstrates introduction of synthetic metabolic pathway(s) into a model plant (specifically Arabidopsis thaliana), and establishes proof of concept for technologies as described herein. The present disclosure further explains applicability of this finding to other plant species, including specifically to other ornamental plant species, and establishes that pathway engineering as described herein may be utilized to enhance pollutant phytoremediation in various plant species, an in particular in various ornamental plants.

[0564] Exemplary constructs comprising a gene of interest (see Table 10) were transformed into plants (e.g., model plant such as Arabidopsis thaliana) to modify a pollutant (e.g., formaldehyde and/or BTEX) metabolism via a synthetic pathway (See Table 10). Methods for transformation and selection are disclosed herein (see, e.g., Example 2) and/or are known in the art.

TABLE 10
Synthetic Pathway and Gene of Interest

| Pathway | Gene 1 | Gene 2 |
|---|---|---|
| RumP | HPS/PHI_a | |
| | HPS_Bm | PHI_Bm |
| | HPS_Mg | PHI_Mg |
| XuMP | DAS_Canbo | DHAK_Sc |
| | DAS_Canbo | DHAK_Ec |
| Serine | FALDH_Ea | FDH |
| BTEX | TodC1 | |
| | PhOH | |

[0565] To measure phytoremediation, transgenic plants were placed in a 2 L glass jar and exposed to high levels of a pollutant (e.g., formaldehyde and/or BTEX) for at least 24 hours. A plant was tested for pollutant biodegradation (e.g., formaldehyde and/or BTEX) and/or kinetics of pollutant biodegradation (e.g., formaldehyde and/or BTEX) by using an air-tight enclosure with an integrated formaldehyde and/or BTEX sensor capable of monitoring a pollutant's concentration over time (e.g., as described in Example 4). The gaseous concentration of the pollutant (e.g., formaldehyde and/or BTEX) was measured before and after this exposure, then results were normalized by leaf surface area.

[0566] Pathway metabolomics were measured by placing transgenic plants in a 2 L jar with 0 mM or at least 5 mM pollutant (e.g. formaldehyde) for at least 18 hours. After exposure, leaves were excised and extracted for detection of fructose and/or Gycline via GC-MS analysis. Fructose, a downstream product of the XuMP pathway, and Glycine, a downstream product of the Serine pathway, were measured.

[0567] Among other things, the present Example confirms that, as described herein, transgenic plants as described herein may have increased removal of formaldehyde mediated by the XuMP pathway, e.g., as compared to an appropriate reference (e.g., a non-transgenic plant). Specifically, in this Example, as demonstrated in FIGS. 18A and 18B, in the particular exemplified engineered plants, formaldehyde phytoremediation capacity was increased at least about 25% (FIG. 18A) and/or fructose relative abundance was increased by at least 50% (FIG. 18B), e.g., as compared to an appropriate reference (e.g., a non-transgenic plant). In some embodiments, a transgenic plant with heterologous expression of a DAS enzyme and a DHADK_Sc enzyme may have increased formaldehyde phytoremediation and/or fructose metabolism when compared to a transgenic plant with heterologous expression of a DAS enzyme and a DHADK_Ec enzyme.

[0568] Among other things, the present Example confirms that, as described herein, transgenic plants may have increased removal of formaldehyde mediated by the serine pathway as compared to an appropriate reference (e.g., a non-transgenic plant). Specifically, in this Example, as demonstrated in FIGS. 19A and 19B, in the particular exemplified engineered plants, formaldehyde phytoremediation capacity was increased at least about 25% (FIG. 19A) and/or glycine relative abundance was increased by at least 50% (FIG. 19B), e.g., as compared to an appropriate reference (e.g., a non-transgenic plant).

[0569] Among other things, the present Example confirms that, as described herein, transgenic plants may have increased BTEX phytoremediation as compared to a reference (e.g., non-transgenic plant). In some embodiments, as demonstrated in FIG. 20, a heterologous expression of a PhOH enzyme and/or a TodClenzyme in a transgenic plant may increase BTEX phytoremediation capacity of the plant, e.g., as compared to an appropriate reference (e.g., a non-transgenic plant). In some embodiments, a transgenic plant, as described herein, may induce production of muconic acid.

### Example 13: Stomatal Density Optimization

[0570] The present Example demonstrates that, among other things, plants may be engineered to express (e.g., to overexpress) a gene that may increase stomatal density and/or pollutant phytoremediation (e.g., formaldehyde). Among other things, the present disclosure provides an insight that such engineering may be applied to ornamental plants to increase stomata formation. Without wishing to be bound by any theory, the present disclosure proposes in particular that such engineering can desirably be applied to a gene that is conserved between ornamental plants. In some embodiments, the methods developed herein to increase stomata formation may enhance pollutant phytoremediation. One particularly useful feature of certain embodiments of this aspect of the present disclosure is its potential applicability across a variety of plant species.

[0571] Exemplary constructs (see Table 2) were transformed (e.g., as described in Example 2) into model plants (e.g., Arabidopsis thaliana) and rate of influx of volatile organic compounds into the plant was assessed. After exposure to high levels of a pollutant (e.g., formaldehyde) for at least 24 hours, engineered plants were tested for pollutant biodegradation (e.g., formaldehyde)

[0572] Among other things, the present Example demonstrates that plants engineered to express (e.g., to overexpress) a gene (AtCaprice, AtStomagen, and/or OsX1) may exhibit increased stomatal density and/or pollutant phytoremediation (e.g., formaldehyde). In some embodiments, as demonstrated in FIG. 21A, an engineered plant, as described herein, may increase leaf stomatal density. In some embodiments, as demonstrated in FIG. 21B, an engineered plant may increase rate of pollutant (e.g., formaldehyde) remediated by the plant by at least 50%, e.g., as compared to an appropriate reference (e.g., a non-transgenic plant) (FIG. 21B). In some embodiment, as demonstrated in FIG. 21C, the amount of formaldehyde remediated by a plant is correlated to stomatal density.

[0573] In some embodiments, as described herein, plants engineered to express (e.g., to overexpress) a gene (AtCaprice, AtStomagen, and/or OsX1) may exhibit increased stomatal density and/or pollutant phytoremediation (e.g., BTEX).

### Example 14: Optimization of Regulatory Elements

[0574] The present Example demonstrates that, among other things, that regulatory elements disclosed herein may be used to drive and/or increase expression of a gene and/or protein of interest.

[0575] The capacity of regulatory elements to increase expression levels of a polypeptide were measured. Leaf mesophyll cells were transformed with a construct comprising a promoter, a fluorescence reporter gene, and a terminator. Single cell fluorescence levels were measured on Epipremnum aureum leaf mesophyll cells to determine expression of the fluorescence reporter polypeptide and strong regulatory element combinations has a fluorescence score of at least 0.65.

[0576] Among other things, the present disclosure demonstrates that various combinations of regulatory elements may be optimized to increase expression of an enzyme of interest. In some embodiments, as demonstrated in FIG. 22A, a construct comprising ZmUbi may increase expression of a gene of interest. In some embodiments, as demonstrated in FIG. 22A, a construct comprising PvUbi2 may increase expression of a gene of interest. In some embodiments, as demonstrated in FIG. 22A, constructs comprising a combination of promotor originating from Epipremnum aureum (e.g., rrEaUbi1, rrEaH32, rrEaCons3, and/or rrEaLeaf1) and terminators (e.g., OCS, 35S, and/or Nos) may increase expression of a gene of interest. In some embodiments, e.g., as demonstrated in FIG. 22A, constructs comprising a combination of promotor originating from Epipremnum aureum (e.g., rrEaH32) and terminators originating from Epipremnum aureum (e.g., Ter 7.1 and/or Ter 7.3) may increase expression of a gene of interest.

### EXEMPLARY EMBODIMENTS

[0577] Embodiment 1. An engineered ornamental indoor plant characterized in that:
   [0578] (a) it expresses at least one heterologous formaldehyde and/or methanol metabolism polypeptide; and
   [0579] (b) when cultivated or maintained in an environment comprising a volatile organic compound (VOC), exhibits an increased rate of air VOC removal, when compared to an ornamental indoor plant that has not been so engineered.
[0580] Embodiment 2. The engineered ornamental indoor plant of embodiment 1 that is stably transformed with at least one expression vector from which the at least one formaldehyde metabolism polypeptide is expressed.
[0581] Embodiment 3. The engineered ornamental indoor plant of embodiment 1 that is stably transformed with a plurality of expression vectors from which a plurality of formaldehyde metabolism polypeptides are expressed.
[0582] Embodiment 4. The engineered ornamental indoor plant of embodiment 1 wherein a plurality of polypeptides function in concert to chemically convert a VOC to a usable sugar substrate.
[0583] Embodiment 5. The engineered ornamental indoor plant of embodiment 1, wherein the at least one heterologous formaldehyde metabolism polypeptide comprises: 3-hexulose-6-phosphate synthase (HPS), 6-phospho-3-hexuloisomerase (PHI), dihydroxyacetone synthase (DAS), dihydroxyacetone kinase (DAK), formaldehyde dehydrogenase (FALDH), glutathione-dependent formaldehyde dehydrogenase (GSH-FALDH), glycolaldehyde synthase (GALS), acetyl-phosphate synthase (ACPS), phosphate acetyltransferase (PTA), 2-keto-4-hydroxybutyrate aldolase (KHB), branched-chain alpha-keto acid decarboxylase (KDC), pyruvate decarboxylase (PDC), NADH-dependent 1,3-PDO oxidoreductase (DhaT), non-specific NADPH-dependent alcohol dehydrogenase (YqhD), serine aldolase (SAL), threonine aldolase (LtaE), serine deaminase (SDA), 4-hydroxy-2-oxobutanoate (HOB) aldolase (HAL), HOB aminotransferase (HAT), serine hydroxymethyltransferase 1 mitochondrial (SHM1), (S)-2-hydroxy-acid oxidase (GLO1 and/or GLO2), formate dehydrogenase (FDH), and/or formolase (FLS).
[0584] Embodiment 6. The engineered ornamental indoor plant of embodiment 1, wherein the at least one heterologous formaldehyde metabolism polypeptide comprises 3-hexulose-6-phosphate synthase (HPS), and/or 6-phospho-3-hexuloisomerase (PHI).
[0585] Embodiment 7. The engineered ornamental indoor plant of embodiment 1, wherein the at least one heterologous formaldehyde metabolism polypeptide a comprises dihydroxyacetone synthase (DAS), and/or dihydroxyacetone kinase (DAK).
[0586] Embodiment 8. The engineered ornamental indoor plant of embodiment 1, wherein the at least one heterologous formaldehyde metabolism polypeptide comprises formaldehyde dehydrogenase (FALDH), glutathione-dependent formaldehyde dehydrogenase (GSH-FALDH), serine hydroxymethyltransferase 1 mitochondrial (SHM1), (S)-2-hydroxy-acid oxidase (GLO1 and/or GLO2) and/or formate dehydrogenase (FDH).
[0587] Embodiment 9. The engineered ornamental indoor plant of embodiment 1, wherein the at least one heterologous formaldehyde metabolism polypeptide comprises formolase (FLS), and/or dihydroxyacetone kinase (DAK).
[0588] Embodiment 10. The engineered ornamental indoor plant of embodiment 1, wherein the at least one heterologous formaldehyde metabolism polypeptide comprises glycolaldehyde synthase (GALS), acetyl-phosphate synthase (ACPS), and/or phosphate acetyltransferase (PTA).
[0589] Embodiment 11. The engineered ornamental indoor plant of embodiment 1, wherein the at least one heterologous formaldehyde metabolism polypeptide comprises 2-keto-4-hydroxybutyrate aldolase (KHB), branched-chain alpha-keto acid decarboxylase (KDC), pyruvate decarboxylase (PDC), NADH-dependent 1,3-PDO oxidoreductase (DhaT), and/or non-specific NADPH-dependent alcohol dehydrogenase (YqhD).
[0590] Embodiment 12. The engineered ornamental indoor plant of embodiment 1, wherein the at least one heterologous formaldehyde metabolism polypeptide comprises serine aldolase (SAL), threonine aldolase (LtaE), serine deaminase (SDA), 4-hydroxy-2-oxobutanoate (HOB) aldolase (HAL), and/or HOB aminotransferase (HAT).
[0591] Embodiment 13. The engineered ornamental indoor plant of embodiment 1, wherein prior to introduction to the ornamental indoor plant, the at least one heterologous formaldehyde metabolism polypeptide has been modified using protein evolution.
[0592] Embodiment 14. A cell or population of cells derived from the engineered ornamental indoor plant of embodiment 1.
[0593] Embodiment 15. An engineered ornamental indoor plant characterized in that:
   [0594] (a) it expresses at least one heterologous benzene, toluene, ethylbenzene, or xylene (BTEX) metabolism polypeptide; and
   [0595] (b) when cultivated or maintained in an environment comprising a volatile organic compound (VOC), exhibits an increased rate of air VOC removal when compared to an ornamental indoor plant that has not been so engineered.
[0596] Embodiment 16. The engineered ornamental indoor plant of embodiment 1 that is stably transformed with at least one expression vector from which the at least one BTEX metabolism polypeptide is expressed.
[0597] Embodiment 17. The engineered ornamental indoor plant of embodiment 15 that is stably transformed with a plurality of expression vectors from which a plurality of BTEX metabolism polypeptides are expressed.
[0598] Embodiment 18. The engineered ornamental indoor plant of embodiment 15 wherein a plurality of polypeptides function in concert to chemically convert BTEX to a usable anabolic substrate.
[0599] Embodiment 19. The engineered ornamental indoor plant of embodiment 15, wherein the at least one heterologous BTEX metabolism polypeptide comprises: cytochrome P450 monooxygenase, O-xylene monooxygenase oxygenase subunit alpha, benzene monooxygenase oxygenase subunit, toluene-4-monooxygenase system ferredoxin-NAD (+) reductase component, toluene monooxygenase alpha subunit, aromatic ring-hydroxylating dioxygenase subunit alpha, hydroxylase alpha subunit, phenylalanine hydroxylase, benzene 1,2-dioxygenase, cis-1,2-dihydrobenzene-1,2-diol dehydrogenase, toluene methyl-monooxygenase, aryl-alcohol dehydrogenase, benzaldehyde dehydrogenase (NAD+), and/or benzaldehyde dehydrogenase (NADP+).
[0600] Embodiment 20. The engineered ornamental indoor plant of embodiment 15, wherein the at least one heterologous BTEX metabolism polypeptide alters the benzene and/or ethylbenzene metabolism pathway, wherein the heterologous polypeptides comprise benzene monooxygenase oxygenase subunit, benzene 1,2-dioxygenase, and/or cis-1,2-dihydrobenzene-1,2-diol dehydrogenase.
[0601] Embodiment 21. The engineered ornamental indoor plant of embodiment 15, wherein the at least one heterologous BTEX metabolism polypeptide alters the toluene and xylene metabolism pathway, wherein the heterologous polypeptides comprise O-xylene monooxygenase oxygenase subunit alpha, toluene-4-monooxygenase system ferredoxin-NAD (+) reductase component, toluene monooxygenase alpha subunit, toluene methyl-monooxygenase, aryl-alcohol dehydrogenase, benzaldehyde dehydrogenase (NAD+) and/or benzaldehyde dehydrogenase (NADP+).
[0602] Embodiment 22. The engineered ornamental indoor plant of embodiment 15, wherein the at least one heterologous BTEX metabolism polypeptide alters the phenol and/or phenol (like) metabolism pathway, wherein the heterologous polypeptides comprise phenol hydroxylase component phP, phenol hydroxylase, and/or uncharacterized protein A4U43_C04F5180.
[0603] Embodiment 23. The engineered ornamental indoor plant of embodiment 15, wherein the at least one heterologous BTEX metabolism polypeptide alters the catechol and/or catechol (like) metabolism pathway, wherein the heterologous polypeptides comprise 3-isopropylcatechol-2,3-dioxygenase, metapyrocatechase, extradiol dioxygenase, catechol 2,3-dioxygenase, and/or catechol 1,2-dioxygenase.
[0604] Embodiment 24. The engineered ornamental indoor plant of embodiment 15, wherein prior to introduction to the ornamental indoor plant, the at least one heterologous BTEX metabolism polypeptide has been modified using protein evolution.
[0605] Embodiment 25. A cell or population of cells derived from the engineered ornamental indoor plant of embodiment 15.
[0606] Embodiment 26. The engineered ornamental indoor plant of embodiment 15, crossed with the engineered ornamental plant of embodiment 1.
[0607] Embodiment 27. The engineered ornamental indoor plant of embodiment 15, comprising the additional engineered attributes of embodiment 1.
[0608] Embodiment 28. A cell or population of cells derived from the engineered ornamental indoor plant of embodiment 25 comprising the additional engineered attributes of embodiment 1.
[0609] Embodiment 29. An engineered ornamental indoor plant characterized in that:
   [0610] (a) at least one pathway related to diffusion and/or active transport of VOCs into the ornamental plant are modified; and
   [0611] (b) when cultivated or maintained in an environment comprising a volatile organic compound (VOC), exhibits an increased rate of air VOC removal when compared to an ornamental indoor plant that has not been modified.
[0612] Embodiment 30. The engineered ornamental indoor plant of embodiment 29 that is stably transformed with at least one expression vector from which the at least one polypeptide related to pathways regulating diffusion and/or active transport of VOCs into the ornamental plant is expressed.
[0613] Embodiment 31. The engineered ornamental indoor plant of embodiment 29 that is stably engineered to have at least one endogenous polypeptide involved in a pathway related to diffusion and/or active transport of VOCs into the ornamental plant modified.
[0614] Embodiment 32. The engineered ornamental indoor plant of embodiment 29 that is stably engineered to have at least one endogenous polypeptide involved in a pathway related to diffusion and/or active transport of VOCs into the ornamental plant knocked-out, silenced, and/or rendered hypomorphic.
[0615] Embodiment 33. The engineered ornamental indoor plant of embodiment 29 that is stably transformed with at least one expression vector from which at least one polypeptide related to pathways regulating diffusion and/or active transport of VOCs is expressed.
[0616] Embodiment 34. The engineered ornamental indoor plant of embodiment 29 that is stably engineered to have at least one endogenous polypeptide related to stomatal flux knocked-out, silenced, and/or rendered hypomorphic, wherein the at least one polypeptide Epidermal Patterning Factor 1 (EPF1) and/or Epidermal Patterning Factor 2 (EPF2).
[0617] Embodiment 35. The engineered ornamental indoor plant of embodiment 29 that is stably transformed with at least one expression vector from which at least one polypeptide related to stomatal flux is expressed, wherein the at least one polypeptide comprises Epidermal Patterning Factor-Like protein 9 (EPFL9) (STOMAGEN)
[0618] Embodiment 36. The engineered ornamental indoor plant of embodiment 29 that is stably transformed with at least one expression vector from which at least one polypeptide related to cuticle wax levels is expressed, wherein the at least one polypeptide comprises Aledehyde Decarbonylase (CER1), Fatty Acid Reductase (CER3), Beta-ketoacyl-coenzyme A Synthase, 3′-5′-exoribonuclease family protein (CER7), and/or WOOLLY.
[0619] Embodiment 37. The engineered ornamental indoor plant of embodiment 29 that is stably transformed with at least one expression vector from which at least one polypeptide related to trichome development is expressed, wherein the at least one polypeptide comprises MYB123-Like, Caprice (CPC), GLABRA1, GLABRA2, and/or GLABRA3.
[0620] Embodiment 38. The engineered ornamental indoor plant of embodiment 29 that is stably transformed with at least one expression vector from which at least one heterologous polypeptide related to active transport of VOCs is expressed, wherein the at least one polypeptide comprises an Oxalate: Formate Antiport polypeptide, Formate: Nitrite Transporter polypeptide, and/or 2FoCA-Anion Channel polypeptide.
[0621] Embodiment 39. The engineered ornamental indoor plant of embodiment 29, wherein prior to introduction to the ornamental indoor plant, the at least one polypeptide involved in a pathway related to diffusion and/or active transport of VOCs has been modified using protein evolution.
[0622] Embodiment 40. A cell or population of cells derived from the engineered ornamental indoor plant of embodiment 29.
[0623] Embodiment 41. The engineered ornamental indoor plant of embodiment 29, crossed with the engineered ornamental plant of any one of embodiments 1 or 15.
[0624] Embodiment 42. The engineered ornamental indoor plant of embodiment 3, comprising the additional engineered attributes of any one of embodiments 1 or 15.
[0625] Embodiment 43. A cell or population of cells derived from the engineered ornamental indoor plant of embodiment 3 comprising the additional engineered attributes of embodiments 1 or 15.
[0626] Embodiment 44. An engineered ornamental indoor plant characterized in that:
   [0627] (a) at least one endogenous gene encoding a protein known to function in transgene silencing has been knocked-out, silenced, and/or rendered hypomorphic.
[0628] Embodiment 45. The engineered ornamental indoor plant of embodiment 4, comprising the additional engineered attributes of any one of embodiments 1-3.
[0629] Embodiment 46. A cell or population of cells derived from the engineered ornamental indoor plant of embodiment 44 comprising the additional engineered attributes of any one of embodiments 1, 15, or 29.
[0630] Embodiment 47. The engineered ornamental indoor plant of embodiment 44, wherein the endogenous gene is RDR6.
[0631] Embodiment 48. A population of engineered microbes modified to be more amenable for VOC removal and/or metabolism when compared to a population of non-engineered microbes under otherwise comparable conditions.
[0632] Embodiment 49. The population of engineered microbes of embodiment 48, wherein the microbes are soil dwelling and comprise microbes of the species: Bacillus metanolcius, Ogataea methanolica, Pseudomonas putida, Phanerochaete chrysosporium, and/or Rugosibacter aromaticivorans.
[0633] Embodiment 50. The population of engineered microbes of embodiment 48, wherein the microbes are leaf and/or epidermal dwelling and comprise microbes of the species: Methylobacterium oryzae, Methylobacterium extorquens, and/or Paraburkholderia phytofirmans.
[0634] Embodiment 51. The population of engineered microbes of embodiment 48, wherein the microbes are leaf and/or epidermal dwelling and comprise microbes of the species: Cladophialophora immunda, Cladophialophora psammophila, Cladosporiulm sphaerospermum, Exophiala xenobiotica, Hormoconis resinae, Paecilomyces variotii, Phanerochaete chrysosporium, Picnidiella resinae, Pseudoeurotium zonatum.
[0635] Embodiment 52. The population of engineered microbes of embodiment 48, wherein the microbes are modified to metabolize formaldehyde with greater efficiency and at a greater capacity than microbes which have not been engineered.
[0636] Embodiment 53. The population of engineered microbes of embodiment 48, wherein the microbes are modified to metabolize BTEX with greater efficiency and at a greater capacity than microbes which have not been engineered.
[0637] Embodiment 54. The population of engineered microbes of embodiment 48, wherein the microbes are modified utilizing horizontal gene transfer from a heterologous microbe that has undergone directed evolution to increase formaldehyde or BTEX metabolism.
[0638] Embodiment 55. The population of engineered microbes of embodiment 48, wherein the microbes are of the species Pseudomonas putida, Methylobacterium oryzae, or Methylobacterium extorquens
[0639] Embodiment 56. The population of engineered microbes of embodiment 48, wherein the microbes are deposited on an engineered ornamental indoor plant of any one of embodiments 1, 15, 29, or 44.
[0640] Embodiment 57. The population of engineered microbes of embodiment 48, wherein the microbes are deposited and stably colonize an engineered ornamental indoor plant of any one of embodiments 1, 15, 29, or 44.
[0641] Embodiment 58. The population of engineered microbes of embodiment 48, wherein the microbes are of the strain MoCBM20.
[0642] Embodiment 59. The population of engineered microbes of embodiment 48, wherein the microbes are of the strain MePA1.
[0643] Embodiment 60. The population of engineered microbes of embodiment 48, wherein the microbes are of the strain PpF1.
[0644] Embodiment 61. The population of engineered microbes of embodiment 48, wherein the microbes are of the strain Cp110553 (CBS110553)
[0645] Embodiment 62. The population of engineered microbes of embodiment 48, wherein the microbes are of the strain Ci110551 (CBS110551).
[0646] Embodiment 63. A plant growth system comprising:
   [0647] (a) at least one container comprising at least one cavity suitable for receiving plant growth media and an engineered ornamental plant, and
   [0648] (b) at least one air flow device engineered to provide increased airflow to an engineered ornamental plant.
[0649] Embodiment 64. The plant growth system of embodiment 63, including at least one drainage system engineered to maintain a desired rhizosphere microbiome composition.
[0650] Embodiment 65. The plant growth system of embodiment 63, wherein a composition of any one of embodiments 1, 15, 29, 44 or 48 are deposited within.
[0651] Embodiment 66. The plant growth system of embodiment 63, wherein (a) and (b) are part of the same physical structure.
[0652] Embodiment 67. The plant growth system of embodiment 63, wherein the at least one container is designed to increase relative airflow and/or air exchange between the soil and/or microbiome and a surrounding environment when compared to a control plant growth system.
[0653] Embodiment 68. The plant growth system of embodiment 63, wherein the at least one container is designed to maximize relative airflow and/or air exchange between the soil and/or microbiome and a surrounding environment when compared to a control plant growth system.
[0654] Embodiment 69. A method of removing at least one VOC from an environment, the method comprising cultivating or maintaining at least one composition of any one of embodiments 1, 15, 29, 44, 48 or 63 in an environment comprising VOCs.
[0655] Embodiment 70. The method of embodiment 7, wherein the method comprises cultivating or maintaining the at least one composition of embodiments 1, 15, 29, 44, 48 or 63 for at least 1 day.
[0656] Embodiment 71. The method of embodiment 7, wherein the method comprises cultivating or maintaining at least one composition of embodiments 1, 15, 29, 44, 48 or 63 for every 100 m³ of indoor space.
[0657] Embodiment 72. A method of assessing an engineered indoor ornamental plant, microbe, plant-microbe combination, or plant-microbe-planter combination of any one of embodiments 1, 15, 29, 44, 48 or 63 comprising:
   [0658] (a) cultivating or maintaining said engineered plant in a controlled environment comprising a readily
[0659] detectable and quantifiable concentration of VOCs, and
   [0660] (b) determining the level and rate of change in VOC levels in said controlled environment.
[0661] Embodiment 73. A method of assessing a vector encoding at least one polypeptide utilized to create an engineered ornamental indoor plant of any one of embodiments 1, 15, 29, or 44 comprising:
   [0662] (a) expressing said vector in a cell, and
   [0663] (b) determining the transcriptional levels, translational levels, and molecular activity levels of said vector;
   [0664] wherein the step of determining the molecular activity of said vector comprises determining the level of VOC removal and/or metabolism relative to that achieved by an otherwise comparable reference cell under otherwise comparable conditions, which reference cell is not expressing or is not expressing to the same level of at least one polypeptide as the test cell.
[0665] Embodiment 74. A vector encoding at least one polypeptide utilized to create an engineered ornamental indoor plant of any one of embodiments 1, 15, 29, or 44.
[0666] Embodiment 75. A method of making an engineered ornamental indoor plant comprising the introduction of at least one vector encoding at least one polypeptide of any one of embodiments 1, 15, 29, or 44.
[0667] Embodiment 76. A method of making at least one vector encoding at least one polypeptide utilized to create an engineered ornamental indoor plant of any one of embodiments 1, 15, 29, or 44.

### EQUIVALENTS

[0668] Those skilled in the art will recognize, or be able to ascertain using no more than routine experimentation, many equivalents to the specific embodiments of the invention described herein. The scope of the present invention is not intended to be limited to the above Description, but rather is as set forth in the following claims:

1. An engineered ornamental indoor plant characterized in that:
(a) it is stably transformed with at least one expression vector;
(b) when cultivated or maintained in an environment comprising a volatile organic compound (VOC), exhibits an increased rate of air VOC removal, when compared to an ornamental indoor plant that has not been so engineered; and
(c) at least one of options (i), (ii), (iii) below applies:
(i) the at least one expression vector expresses a formaldehyde or methanol metabolism polypeptide;
(ii) the at least one expression vector expresses a heterologous benzene, toluene, ethylbenzene, or xylene (BTEX) metabolism polypeptide; and
(iii) the at least one expression vector expresses a polypeptide that regulates diffusion and/or active transport of VOCs into the ornamental plant.

2. The engineered ornamental indoor plant of claim 1, wherein
a) option (i) applies, and
b) a plurality of polypeptides expressed by the plant function in concert to convert a VOC to a usable sugar substrate.

3.-4. (canceled)

5. The engineered ornamental indoor plant of claim 2, wherein the at least one heterologous formaldehyde metabolism polypeptide comprises: 3-hexulose-6-phosphate synthase (HPS), 6-phospho-3-hexuloisomerase (PHI), dihydroxyacetone synthase (DAS), dihydroxyacetone kinase (DAK), formaldehyde dehydrogenase (FALDH), glutathione-dependent formaldehyde dehydrogenase (GSH-FALDH), glycolaldehyde synthase (GALS), acetyl-phosphate synthase (ACPS), phosphate acetyltransferase (PTA), 2-keto-4-hydroxybutyrate aldolase (KHB), branched-chain alpha-keto acid decarboxylase (KDC), pyruvate decarboxylase (PDC), NADH-dependent 1,3-PDO oxidoreductase (DhaT), non-specific NADPH-dependent alcohol dehydrogenase (YqhD), serine aldolase (SAL), threonine aldolase (LtaE), serine deaminase (SDA), 4-hydroxy-2-oxobutanoate (HOB) aldolase (HAL), HOB aminotransferase (HAT), serine hydroxymethyltransferase 1 mitochondrial (SHM1), (S)-2-hydroxy-acid oxidase (GLO1 and/or GLO2), formate dehydrogenase (FDH), and/or formolase (FLS).

6.-14. (canceled)

15. The engineered ornamental indoor plant of claim 1, wherein
(a) option (ii) applies; and
(b) prior to introduction to the ornamental indoor plant, the at least one heterologous BTEX metabolism polypeptide has been modified using protein evolution.

16.-17. (canceled)

18. The engineered ornamental indoor plant of claim 15, wherein a plurality of polypeptides function in concert to chemically convert BTEX to a usable anabolic substrate.

19. The engineered ornamental indoor plant of claim 15, wherein the at least one heterologous BTEX metabolism polypeptide comprises: cytochrome P450 monooxygenase, O-xylene monooxygenase oxygenase subunit alpha, benzene monooxygenase oxygenase subunit, toluene-4-monooxygenase system ferredoxin-NAD (+) reductase component, toluene monooxygenase alpha subunit, aromatic ring-hydroxylating dioxygenase subunit alpha, hydroxylase alpha subunit, phenylalanine hydroxylase, benzene 1,2-dioxygenase, cis-1,2-dihydrobenzene-1,2-diol dehydrogenase, toluene methyl-monooxygenase, aryl-alcohol dehydrogenase, benzaldehyde dehydrogenase (NAD+), and/or benzaldehyde dehydrogenase (NADP+), wherein the at least one heterologous BTEX metabolism polypeptide alters
(a) the benzene and/or ethylbenzene metabolism pathway;
(b) the toluene and/or xylene metabolism pathway; or
(c) a combination of (a) and (b).

20.-21. (canceled)

22. The engineered ornamental indoor plant of claim 15, wherein the at least one heterologous BTEX metabolism polypeptide alters the phenol and/or phenol (like) metabolism pathway, wherein the heterologous polypeptides comprise phenol hydroxylase component phP, phenol hydroxylase, and/or uncharacterized protein A4U43_C04F5180.

23. The engineered ornamental indoor plant of claim 15, wherein the at least one heterologous BTEX metabolism polypeptide alters the catechol and/or catechol (like) metabolism pathway, wherein the heterologous polypeptides comprise 3-isopropylcatechol-2,3-dioxygenase, metapyrocatechase, extradiol dioxygenase, catechol 2,3-dioxygenase, and/or catechol 1,2-dioxygenase.

24.-28. (canceled)

29. The engineered ornamental indoor plant of claim 1, wherein
(a) option (iii) applies; and
(b) at least one pathway related to diffusion and/or active transport of VOCs into the ornamental plant is modified,
wherein prior to introduction to the ornamental indoor plant, the at least one polypeptide involved in a pathway related to diffusion and/or active transport of VOCs has been modified using protein evolution.

30.-33. (canceled)

34. The engineered ornamental indoor plant of claim 29, wherein the engineered ornamental indoor plant is stably engineered to have at least one endogenous polypeptide related to stomatal flux knocked-out, silenced, and/or rendered hypomorphic, wherein the at least one endogenous polypeptide is an Epidermal Patterning Factor 1 (EPF1) and/or Epidermal Patterning Factor 2 (EPF2).

35. The engineered ornamental indoor plant of claim 29, wherein at least one of the following is expressed from the at least one expression vector:
(a) at least one polypeptide related to stomatal flux is expressed, wherein the at least one polypeptide comprises Epidermal Patterning Factor-Like protein 9 (EPFL9) (STOMAGEN);
(b) at least one polypeptide related to cuticle wax levels is expressed, wherein the at least one polypeptide related to cuticle wax levels comprises Aledehyde Decarbonylase (CER1), Fatty Acid Reductase (CER3), Beta-ketoacyl-coenzyme A Synthase, 3′-5′-exoribonuclease family protein (CER7), and/or WOOLLY;
(c) at least one polypeptide related to trichome development is expressed, wherein the at least one polypeptide related to trichome development comprises MYB123-Like, Caprice (CPC), GLABRA1, GLABRA2, and/or GLABRA3; and
(d) at least one heterologous polypeptide related to active transport of VOCs is expressed, wherein the at least one heterologous polypeptide comprises an Oxalate: Formate Antiport polypeptide, Formate: Nitrite Transporter polypeptide, and/or 2FoCA-Anion Channel polypeptide.

36.-43. (canceled)

44. An engineered ornamental indoor plant characterized in that:
(a) at least one endogenous gene encoding a protein known to function in transgene silencing has been knocked-out, silenced, and/or rendered hypomorphic.

45.-46. (canceled)

47. The engineered ornamental indoor plant of claim 44, wherein the endogenous gene is RDR6.

48. A population of engineered microbes modified to be more amenable for VOC removal and/or metabolism when compared to a population of non-engineered microbes under otherwise comparable conditions,
wherein the population of non-engineered microbes is selected from:
(a) a first population of engineered microbes modified from a reference strain of a species selected from Bacillus metanolcius, Ogataea methanolica, Pseudomonas putida, Phanerochaete chrysosporium, or Rugosibacter aromaticivorans;
(b) a second population of engineered microbes modified from a second reference strain of a species selected from Methylobacterium oryzae, Methylobacterium extorquens, Paraburkholderia phytofirmans; and
(c) a third population of engineered microbes modified from a third reference strain of a species selected from Cladophialophora immunda, Cladophialophora psammophila, Cladosporiulm sphaerospermum, Exophiala xenobiotica, Hormoconis resinae, Paecilomyces variotii, Phanerochaete chrysosporium, Picnidiella resinae, or Pseudoeurotium zonatum.

49.-62. (canceled)

63. A plant growth system comprising:
(a) at least one container comprising at least one cavity suitable for receiving plant growth media and an engineered ornamental plant that is designed to increase or maximize relative airflow and/or air exchange between the soil and/or microbiome and a surrounding environment when compared to a control plant growth system;
(b) at least one air flow device engineered to provide increased airflow to an engineered ornamental plant;
(c) at least one drainage system coupled to or integrated into the at least one container and engineered to maintain a desired rhizosphere microbiome composition; or
(d) a combination of (a), (b), and (c),
wherein (a) and (b) are part of the same structure.

64. (canceled)

65. The plant growth system of claim 63, wherein the system comprises an engineered ornamental indoor plant that, when cultivated or maintained in an environment comprising a volatile organic compound (VOC), exhibits an increased rate of air VOC removal when compared to an ornamental indoor plant that has not been so engineered, the engineered ornamental indoor plant comprising at least one additional characteristic chosen from (a) through (d) below:
(a) it is stably transformed with at least one expression vector that is used to express at least one heterologous formaldehyde and/or methanol metabolism polypeptide;
(b) it is stably transformed with at least one expression vector that is used to express at least one heterologous benzene, toluene, ethylbenzene, or xylene (BTEX) metabolism polypeptide;
(c) it is stably transformed with at least one expression vector that is used to express at least one polypeptide related to pathways regulating diffusion and/or active transport of VOCs into the ornamental plant; and
(d) it comprises at least one endogenous gene encoding a protein known to function in transgene silencing that has been knocked-out, silenced, and/or rendered hypomorphic.

66. The plant growth system of claim 65, comprising a composition of engineered microbes deposited into the plant growth media and/or on the engineered ornamental indoor plant, wherein the composition comprises one or more engineered microbe populations selected from:
(a) a first population of engineered microbes modified from a reference strain of a species selected from Bacillus metanolcius, Ogataea methanolica, Pseudomonas putida, Phanerochaete chrysosporium, or Rugosibacter aromaticivorans;
(b) a second population of engineered microbes modified from a second reference strain of a species selected from Methylobacterium oryzae, Methylobacterium extorquens, Paraburkholderia phytofirmans; and
(c) a third population of engineered microbes modified from a third reference strain of a species selected from Cladophialophora immunda, Cladophialophora psammophila, Cladosporiulm sphaerospermum, Exophiala xenobiotica, Hormoconis resinae, Paecilomyces variotii, Phanerochaete chrysosporium, Picnidiella resinae, or Pseudoeurotium zonatum, wherein the engineered microbes are characterized by one or both of greater VOC removal and greater VOC metabolism when compared to the respective reference strain.

67.-71. (canceled)

72. A method of assessing a capacity of the engineered indoor ornamental plant of claim 1 to remove VOC from a controlled environment, the method comprising:
(a) cultivating or maintaining said engineered plant in the controlled environment, the controlled environment comprising a readily detectable and quantifiable concentration of VOCs; and
(b) determining the level and rate of change in VOC levels in the controlled environment.

73.-76. (canceled)

The application's sequence listing, which the Patent Office published only in electronic form, follows.

SEQUENCE LISTING (410 sequences)

SEQ ID NO: 1 - DNA, 1984 bp, Zea mays
  promoter (1)..(1984): Zea mays Ubiquitin 1 promoter (ZmUbi1)
ctgcagtgcagcgtgacccggtcgtgcccctctctagagataatgagcattgcatgtctaagttataaaaaattaccacatattttttttgtcacacttgtttgaagtgcagtttatctatctttatacatatatttaaactttactctacgaataatataatctatagtactacaataatatcagtgttttagagaatcatataaatgaacagttagacatggtctaaaggacaattgagtattttgacaacaggactctacagttttatctttttagtgtgcatgtgttctcctttttttttgcaaatagcttcacctatataatacttcatccattttattagtacatccatttagggtttagggttaatggtttttatagactaatttttttagtacatctattttattctattttagcctctaaattaagaaaactaaaactctattttagtttttttatttaataatttagatataaaatagaataaaataaagtgactaaaaattaaacaaataccctttaagaaattaaaaaaactaaggaaacatttttcttgtttcgagtagataatgccagcctgttaaacgccgtcgacgagtctaacggacaccaaccagcgaaccagcagcgtcgcgtcgggccaagcgaagcagacggcacggcatctctgtcgctgcctctggacccctctcgagagttccgctccaccgttggacttgctccgctgtcggcatccagaaattgcgtggcggagcggcagacgtgagccggcacggcaggcggcctcctcctcctctcacggcaccggcagctacgggggattcctttcccaccgctccttcgctttcccttcctcgcccgccgtaataaatagacaccccctccacaccctctttccccaacctcgtgttgttcggagcgcacacacacacaaccagatctcccccaaatccacccgtcggcacctccgcttcaaggtacgccgctcgtcctcccccccccccctctctaccttctctagatcggcgttccggtccatggttagggcccggtagttctacttctgttcatgtttgtgttagatccgtgtttgtgttagatccgtgctgctagcgttcgtacacggatgcgacctgtacgtcagacacgttctgattgctaacttgccagtgtttctctttggggaatcctgggatggctctagccgttccgcagacgggatcgatttcatgattttttttgtttcgttgcatagggtttggtttgcccttttcctttatttcaatatatgccgtgcacttgtttgtcgggtcatcttttcatgcttttttttgtcttggttgtgatgatgtggtctggttgggcggtcgttctagatcggagtagaattctgtttcaaactacctggtggatttattaattttggatctgtatgtgtgtgccatacatattcatagttacgaattgaagatgatggatggaaatatcgatctaggataggtatacatgttgatgcgggttttactgatgcatatacagagatgctttttgttcgcttggttgtgatgatgtggtgtggttgggcggtcgttcattcgttctagatcggagtagaatactgtttcaaactacctggtgtatttattaattttggaactgtatgtgtgtgtcatacatcttcatagttacgagtttaagatggatggaaatatcgatctaggataggtatacatgttgatgtgggttttactgatgcatatacatgatggcatatgcagcatctattcatatgctctaaccttgagtacctatctattataataaacaagtatgttttataattattttgatcttgatatacttggatgatggcatatgcagcagctatatgtggatttttttagccctgccttcatacgctatttatttgcttggtactgtttcttttgtcgatgctcaccctgttgtttggtgttac

SEQ ID NO: 2 - DNA, 1399 bp, Oryza sativa
  promoter (1)..(1399): Oryza sativa Actin 1 promoter (OsAc1)
tcgaggtcattcatatgcttgagaagagagtcgggatagtccaaaataaaacaaaggtaagattacctggtcaaaagtgaaaacatcagttaaaaggtggtataaagtaaaatatcggtaataaaaggtggcccaaagtgaaatttactcttttctactattataaaaattgaggatgtttttgtcggtactttgatacgtcatttttgtatgaattggtttttaagtttattcgcttttggaaatgcatatctgtatttgagtcgggttttaagttcgtttgcttttgtaaatacagagggatttgtataagaaatatctttaaaaaaacccatatgctaatttgacataatttttgagaaaaatatatattcaggcgaattctcacaatgaacaataataagattaaaatagctttcccccgttgcagcgcatgggtattttttctagtaaaaataaaagataaacttagactcaaaacatttacaaaaacaacccctaaagttcctaaagcccaaagtgctatccacgatccatagcaagcccagcccaacccaacccaacccaacccaccccagtccagccaactggacaatagtctccacacccccccactatcaccgtgagttgtccgcacgcaccgcacgtctcgcagccaaaaaaaaaaaaagaaagaaaaaaaagaaaaagaaaaaacagcaggtgggtccgggtcgtgggggccggaaacgcgaggaggatcgcgagccagcgacgaggccggccctccctccgcttccaaagaaacgccccccatcgccactatatacatacccccccctctcctcccatccccccaaccctaccaccaccaccaccaccacctccacctcctcccccctcgctgccggacgacgagctcctcccccctccccctccgccgccgccgcgccggtaaccaccccgcccctctcctctttctttctccgttttttttttccgtctcgctctcgatctttggccttggtagtttgggtgggcgagaggcggcttcgtgcgcgcccagatcggtgcgcgggaggggcgggatctcgcggctggggctctcgccggcgtggatccggcccggatctcgcggggaatggggctctcggatgtagatctgcgatccgccgttgttgggggagatgatggggggtttaaaatttccgccatgctaaacaagatcaggaagaggggaaaagggcactatggtttatatttttatatatttctgctgcttcgtcaggcttagatgtgctagatctttctttcttctttttgtgggtagaatttgaatccctcagcattgttcatcggtagtttttcttttcatgatttgtgacaaatgcagcctcgtgcggagcttttttgtaggtag

SEQ ID NO: 3 - DNA, 1861 bp, Panicum virgatum L
  promoter (1)..(1861): Panicum virgatum L. Ubiquitin 2 promoter (PvUbi2)
gaagccaactaaacaagaccataaccatggtgacatttgacatagttgtttactacttgcttgagccccacccttgcttatcggttgaacattacaagatacactgcgggtggcctaaggcacaccgtccgaaaccggcaaaccaagcctgatcgccgaaatccaaaatcactaccggcaatctctaaagtttatttcatccttatatgacgaggaaagaaaagaagagagaaataatatcttaacttctaaatcagtcgcgtcaactttctcggctaagaaagtgagcactatcatttcgcagaccatgtcatgagtgccgacttgccatatcttattatattcttatttatttaattataatcccattgcaatacgtctattctatcatggcctgccactaacgctccgtctaacgtcgttaagccattgtcataagcggctgctcaaaactcttcccggtggaggcgaggcgttaacggcgtctacaaatctaacggccaccaaccatccagccgcctctcgaaagctccgctccgatcgcggaaattgcgtggcggagacgagcgggctcctctcacacggcccggaaccgtcacggcacgggtgggggattccttccccaaccctccccacctctcctccccccgtcgcagcccataaatacagggccctccgcgcctcttcccacaatctcacatcgtctcatcgttcggagcgcacaacccccgggttccaaatccaaattgctcttctcgcgaccctcggcgatccttcccccgcttcaaggtacggcgatcgtctcccccgtcctcttgccccatctcctcgctcggcgtggtttggtggttctgcttggtctgtggctaggaactaggctgaggcgttgacgaaatcatgctagatccgcgtgtttcctgatcgtgggtggctgggaggtggggttttcgtgtagatctgatcggttccgctgtttatcctgtcatgctcatgtgatttgtggggattttaggtcgtttgtccgggaatcgtggggttgcttctaggctgttcgtagatgagatcgttctcacgatctgctgggtcgctgcctaggttcagctaggtctgccctgtttttgggttcgttttcgggatctgtacgtgcatctattatctggttcgatggtgctagctaggaacaaacaactgattcgtccgatcgattgttttgttgccatgtgcaaggttaggtcgttatctgattgctgtagatcagagtagaataagatcatcacaagctagctcttgggcttattatgaatctgcgtttgttgcatgattaagatgattatgctttttcttatgctgccgtttgtatatgatgcggtagcttttaactgaatagcacacctttcctgtttagttagattagattagattgcatgatagatgaggatatatgctgctacatcagtttgatgattctctggtacctcataatcaactagctcatgtgcttaaattgaaactgcatgtgccacatgattaagatgctaagattggtgaagatatatacgctgctgttcctataggatcctgtagcttttacctggtcaacatgcatcgtcctgttatggatagatatgcatgatagatgaagatatgtactgctacaatttgatgattcttttgtgcacctgatgatcatgcatgctctttgcccttactttgatatacttggatgatggcatgcttagtactaatgatgtgatgaacacacatgacctgttggtatgaatatgatgttgctgtttgcttgtgatgagttctgtttgtttactgctaggcacttaccctgttgtctggttctcttttgcag

SEQ ID NO: 4 - DNA, 2000 bp, Panicum virgatum L.
  promoter (1)..(2000): Panicum virgatum L. Ubiquitin 1 fusion promoter (PvUbi1+3)
ccactggagaggggcacacacgtcagtgtttggtttccactagcacgagtagcgcaatcagaaaattttcaatgcatgaagtactaaacgaagtttatttagaaatttttttaagaaatgagtgtaattttttgcgacgaatttaatgacaataattaatcgatgattgcctacagtaatgctacagtaaccaacctctaatcatgcgtcgaatgcgtcattagattcgtctcgcaaaatagcacaagaattatgaaattaattttacaaactatttttatttaatactaataattaactgtcaaagtttgtgctactcgcaagagtagcgcgaaccaaacacggcctggaggagcacggtaacggcgtcgacaaactaacggccaccacccgccaacgcaaaggagacggatgagagttgacttcttgacggttctccacccctctgtctctctgtcactgggccctgggtccccctctcgaaagttcctctggccgaaattgcgcggcggagacgaggcgggcggaaccgtcacggcagaggattccttccccaccctgcctggcccggccatatataaacagccaccgcccctccccgttccccatcgcgtctcgtctcgtgttgttcccagaacacaaccaaaatccaaatcctcctcctcctcccgagcctcgtcgatccctcacccgcttcaaggtacggcgatcctcctctcccttctcccctcgatcgattatgcgtgttccgtttccgtttccgatcgagcgaatcgatggttaggacccatgggggacccatggggtgtcgtgtggtggtctggtttgatccgcgatatttctccgttcgtagtgtagatctgatcgaatccctggtgaaatcgttgatcgtgctattcgtgtgagggttcttaggtttggagttgtggaggtagttctgatcggtttgtaggtgagattttccccatgattttgcttggctcgtttgtcttggttagattagatctgcccgcattttgttcgatatttctgatgcagatatgatgaataatttcgtccttgtatcccgcgtccgtatgtgtattaagtttgcaggtgctagttaggtttttcctactgatttgtcttatccattctgtttagcttgcaaggtttggtaatggtccggcatgtttgtctctatagattagagtagaataagattatctcaacaagctgttggcttatcaattttggatctgcatgtgtttcgcatctatatctttgcaattaagatggtagatggacatatgctcctgttgagttgatgttgtaccttttacctgaggtctgaggaacatgcatcctcctgctactttgtgcttatacagatcatcaagattatgcagctaatattcgatcagtttctagtatctacatggtaaacttgcatgcacttgctacttatttttgatatacttggatgataacatatgctgctggttgattcctacctacatgatgaacattttacaggccattagtgtctgtctgtatgtgttgttcctgtttgcttcagtctatttctgtttcattcctagtttattggttctctgctagatacttaccctgctgggcttagttatcatcttatctcgaatgcattttcatgtttatagatgaatatacactcagataggtgtagatgtatgctactgtttctctacgttgctgtaggttttacctgtggcaactgcatactcctgttgcttcgctagatatgtatgtgcttatatagattaagatatgtgtgatggttctttagtatatctgatgatcatgtatgctcttttaacttcttgctacacttggtaacatgctgtgatgctgtttgttgattctgtagcactaccaatgatgaccttatctctctttgtatatgatgtttctgtttgtttgaggcttgtgttactgctagttacttaccctgttgcctggctaatcttctgcagatgcagatc

SEQ ID NO: 5 - DNA, 1853 bp, Oryza sativa
  promoter (1)..(1853): Oryza sativa Cytochrome c gene promoter (OsCc1)
gaattcggatcttcgaaggtaggctgcagttcttgaattgttgaattattattatcttcatcttcattcatctgtaactactgattcatctggtttgttattaccgatcgtaatgccgttgttttgtcaaaaaaaaaaaaggagatcggtttgttattaccgatcataatgctgttcttttataaaaaaaaaacatggatctattggcataatctttttgcgccaggtactccgaccattactcggttaccgacgaaagccggtgagatttggataaacttcgccaaaaatttaaatttccgtttgatctctcaaacgtgggctggtttaggcctgtttaatgtttagacacatgtatggagtactaaatattaataaaaaaaataattacacagatcgtgtgtaaattgcgagataaatcttttaagcctaattgctccatgaacaatgtggtgttacagtaaacatttgctaatgacagattaattaggcttaataaattcgtctcacagtttacaggtgaaatatgtaatttatttattattaagtctatatataatactttaaatacgtgaccgtatatcccgatgggagacacgtaaaactttttaaccaagttctaaacacaaccttgcttcacagtttcttgatctctatgggtaggggtgggcagaaaaagaccgaaccgaaagaccgaaccgaaaaggccgagaccgagaccgaaaagatcgagaccgagaaattcggtcctaggtaatgaaagaccgaattttgttcggtcaatttggttagttttctcgggtaaccgaatagaccgaaaagaccaaattatcagaaaatatctaaatacaatctacaacccactatgtttaataggattaaactctaattttttacatccctacttcttttaggcatgcaacctaataagagtctttactcataagtgcttacgaaatttttttgtgatttttgtgttgaaaatttccattatttctttgcatatatgaaaatgttgttgaatttcggtcaggaccgagaccgagactgaatttgtcagtcctaacattttttcaccgaaattcagtcttcacttttcaaagactgaaaagaccgaaagactgaagaccgagaccgaaattttcggttagaccgaatgcccacccctatctacgggcttgataagatcaataaccgtaattaccgaagcggttgcgtgacttgctgttgcatttgtcaaccctaacatagtactacctccgtttcaaggttccgtttcagagtttgtaaaactttcctagtattaacccatgttttaacttgcaacgggaggaagttaacatcctatacgcctgaaatccctttaaaaaaaaagaacatttatacgctggaaccgattctgaaccggtccgtccacccaccgacccaccaacggtgcgatttccaccgtccaccaaacgcgagccgcctccaccctccacctatcgagtcaaagacgacgactctaccagagcacgtggacccggtccacgaacggaacgcccttacaccgaatgggccgttgggtgtccacgcctcccacacccacaccccccttgcctttttctgcaagacacggaaaccttctggaaccgcgtggattccccgaaacgcccctgcccccacgctccacccgttcaataattctaggggtattatcgtagtttcgccacctgcccttccgccgcgctggtgtatactagggcacgcgctcctcggaatcgccacgagcccacgagccagaaaaaaaaggaaaaaaagagagtcgtagttcgcctcttcttcctcctctcgttctcgcggcggcggcggag

SEQ ID NO: 6 - DNA, 921 bp, Oryza sativa
  promoter (1)..(921): Epipremnum Aureum Ubiquitin promoter (rrEaUbi1 or P1)
acagagtaatccttcaagacacataataactcacgaatgtaaagaactacaaacacacaaaattgttcaaaaaaatttatgcaagaaattttttaagttacattatagcacattcacataagtgagtgtcaaattgatggataatctcctatattttataaaaaattacactcacatgagtacatgttataatctaataagaaatcattatagtatataaattatttctcatgtttatgatagcacgcaccacttgcaacacgtaaagtatgtacgtgactacatgtacaaatctaaataatgttggggtaagataaaaatttaacaaatttaacatgtaaatacttttgggtcagacttaatgcatcgtttaagaaaagcgatgctggatcgcacacccatgatcaaataatttcttgtaaatatctttttgaaaaattttaagttaattaaatatactcccgttaaaatatttttttataaaaaatctgctacataaatgtcatttatatccccattgcatatgtatatatacatatatataccatatatgctggttatatataaagagatatatttttaacaaagtaattatttttaactgacagttattggtctggggcaaatttaatttaacagggtatatatgcaatttacccaaaactttttaatcttttcccgtggggcgaaggagcagaccggctccgatccaaacattcgccctcgtattccgtctcctcaatctctctctctctctctctctttcttcgctccctcctgcaagcaaaagccaatatttttcttcctccaaatccccctttcctctacaaacaacacccctcactgcttctcttgcttctctccccgcctcagaatcaccagatcgcaactcgatctagggtttagaaccggtacgtctcc

SEQ ID NO: 7 - DNA, 930 bp, Epipremnum Aureum
  promoter (1)..(930): Epipremnum Aureum Ubiquitin promoter (rrEaUbi3)
ggggtgcgacaacattacctagttcattagtgggaccatctgcagattgaggactcttggatcatccgaaagtagttccagtgccttgactcagacttattagagtaacactagagcggcaccgaccatttctcgacgggatcgagttctttccagttaggaggagttggtggagacactaaaaatagggttcgttttgaccctgggtgggtctgcaacagacgagaatgtgcgaaaatgacaatgacatcactttaatttggagacgagtagtgggcccagtaagaattttgtggtgccatcattattaagcatgttaaggttgggagtcttttgataccttattgggcttatttgggcttagttttattttttttttcttcatattttttatatgattttcatgcatttttttatgtgtgaggaatattttggtcataaaatgtcttttacagttagagttatgagagagtttataaatatgttctataactctcttttttaattattggaaaatcttgttgcgaattttgagtattttattgtactctatgagagaggttgagaggaccgctacttacggtcatccgcgagagacggggacttacattcctcatcgcccacccctttgctgcctttgtgactgtgttcctcgttaagaagtctgatccctgaaaagttgctaaagatacctctatcacatctgacgtgttgtgaggatcgtaatggtgtaatcacaactcaaatcagatgtcggacgggcttgatttcatactggtagattcttttggaacccgtgattgcacaacgtatggctgggggggtacgtgtcgtcgtggcactatgtaaggcaagctgaagtgagcataaacaacaagtagacctcgatggatgagtttgtcatcttcaggcattcatcaatgtggacgc

SEQ ID NO: 8 - DNA, 352 bp, Epipremnum Aureum
  promoter (1)..(352): Epipremnum Aureum Ubiquitin promoter (rrEaUbi4)
gcaagttgcgtaatcgtgctccgttgctgagtggtttgttttggactcctggttctggctcgtcagacaactggtaaacatagaaataatcaactaagctgcaaatttcccgcaagggaagttggcggcagacaattgaactgtaacatttgaatgtaatggtttttcggttgttgacaggataattttagttaacaccccggctctctcacccggagttcctgcctgtgccttgcgggcattgggcttttgaactgtgtttggactcatggaattgcatgaaaacttggagcgtgaggttgcacgttagaagtgtatagaagtgccttaggagttagctccgggtgtggga

SEQ ID NO: 9 - DNA, 986 bp, Epipremnum Aureum
  promoter (1)..(986): Epipremnum Aureum Actin promoter (rrEaAct1)
tctgttgtgacatgtgacgtgaatctaaagaaacactcgctatttgcattatttttcttgtattttcagtgaagcaaagtgtcaaagttgcctatcgttggtcaagatcctggatctgttggggatctctccttacattgcaatttcctcttgtccttattgttttaatttcggaaagcgctatttgttgcttgctttgttgcagtttacatcatcccttcttgatgctctttggggggaaatctctctgggacattcgataatatttggaaaaaaatagtctgcgagccagaagccccagtgcgctctcgtttgtttttcgtctcatgcttcttaatcttgtatttggcatttgggaagagtgacacaggatatgctatctaattagtaaatgaatgtgtttatcgtgcggacaactaattattcagatggatgaaattcttgaagatttatgttaagaataaatcattatgcaataatttcctaaatgtcaattgatattgcatcggatttcacatgcaccagtaaaactagtacttacctgtggttcatgacaaacacgattttttttaatttttctaatgcaatttactttttctgctcatactttctcttaaagtaacatccatctccacttgtttttttttcctttctcaaatatatcttgatccacacttaccgacaagcctgtactggtttatctgattgttaaatttgatgttacatttgaatgggaagagatatcatgttagttcggttctagcattaaaatgcctagtacatcttactccttttgcagaatgactttctttatacatatggtacgttatttttcttgaaatggagcttgcccaagcagaatttcttttttcatggatgatggttgtcgttggtagtttaattttatcattaacctttcacgtcttacatatttctcagatattggtgaatattttaatctgaaacgtaaagtgagcaggtgtaga

SEQ ID NO: 10 - DNA, 989 bp, Epipremnum Aureum
  promoter (1)..(989): Epipremnum Aureum Actin promoter (rrEaAct2)
acaccatcaccctcattggtttctgtagcatgactctgagctacgatggaagatccaagttccaaaataaaaatagtccctggtgtcactattgggtcgctcaagcaaggcatatattgtctaagttgacctgaaaattgcatgaccaaatctgattcccgctcacggccctgtccgcgacgtcactcgtgaaactccctattagagggagagtggagcatcatgcttggaagctaaaaaaaaatggatgatgtcaaaattccaaactaacaataagtaatgagctgtattgggcaaataatactaatatagaagtagtaagtaaaagagagagaaaaaagagtcaataaaaaaaatgcaacaaaaggttttgtgcttaccgaccgctgtccgtggcacttcccggttcgtgggggacatttgttggcaaatatcttttttattattattcaaaaaaaatgaaaaggaagggagataagaaaagacaagagactgctctcccacaccttaatgcaactcaggttggttcacttatggtgcaacacaaggtaacctgcaatcaaaaggtctgggcagctggattttgtgctgtcttactttagaagcacaactctttgacatatgctttggtggaatttatcaaaggaaaagctcctgatgttgtaaacagtgggtcaataacacaacaggctaaaacagatttcatgaaaaattcattctctggtctgctatagaaaagttcttcacagtgattttggggctaccagatgttcagaggtggtattcagctagcggcaatttcaagctgggttgcagtttgaaggcagaaaagagacaggctgttctttgcctgatcagggattgtcccccatctctctccctctgtcttttctctccctcctgcactcccatcagaaaatagcagggagagagagactgatgggtctttccctctctcactgatttttccctttctcctggttttctct

SEQ ID NO: 11 - DNA, 923 bp, Epipremnum Aureum
  promoter (1)..(923): Epipremnum Aureum Histone H3 promoter (rrEaH32 or P7)
atggctgcattacctgacgtacaatattattggtaggtaattcgagattaactatgaaatatgtatatgtgtctcacaactaagtaatggccaacttagttaaccaggttatgaacaagttaaagttggtgtcaaactctggattaacttcagagtaaccactctctacttagaacccaaaacttatgtaagttaatactaatgagtaatctctggactaacccaccacaccaattcatgacttttggaagaaagattacttattaatccgaataatttggaccccctttttgaaaataattattgagttaattctgaactattaaatatttcatattattaataatcattttaaataaaagctgctgatcttagttgtaattttttttactattaacaaagagagagataaacgcatttttttctatttttataccaaaattaacccatattcaaattttggggatgacacatgaattaagctagtttctcattagaaaaagatcttagccttacttattaggggtacatagataatttaatttttttaaatgttttcacgtaatttcaaaccatttaggccaaagcgggccgaattcaaattcgtgggctcggtgtcacgttggtccagccagagcagtgttatcagcttcctacctggtgaaggtacgccattggctgttgtccgacgacgcggatcaagttgcataaacaaattcgcaccgtccgatgaaagcgaatgatcccgattcactcaaggggcccccgctgcggcagcggcggagaaaatttcgaactctccgccaaaagggctcctctctctctctctctctacaaatactcgccaaaggctccccctttgttctacccaagcagtcctcgctgctccagatcgagaggcatccagagagcgtccgaaagaa

SEQ ID NO: 12 - DNA, 903 bp, Epipremnum Aureum
  promoter (1)..(903): Epipremnum Aureum Histone H3 promoter (rrEaH31)
tgttacaaaacagaagaaatttgacatatgtgttgaacataatcttgtcctaatatttttttattttttttaaaattttaaagtacttaaaaatattatctcttaaaatcaacgtccatcacacaatttgtaaatttggaccaagtcaacctgagttgattgacttagttcatattcaattatttagtatatacgattcaatacaaattatttaaataataatataatatttaaaatataatttacatattttataaaaattaaaaataataaaaatttaaatatgtgacttaataagtcacaagagttttgatatgtggataaaagtttctatagacaaacaagatttttttgaataaaaattatctactaaattgtaaaagttttatgagattttaagatttgttatttataaacataaaatttttaatgttaaataaaataaaataattgatgaaaatttaaattatcctattatattgtcaaaaaattcacaagagaagagtggcagtcaaaagttatcctcgaattattttcttaatatagataaaaaaaagatctcgagagaatttaaaatttagaaacccctggcccaccctagcccagaaagctcgccagccgcgctggccgggcccgcacttacgctcccaagagggagcttggccaaggtcgaaagtgacggcgatcgcgatccgcgtgctattcctcaggatcatctcaaccgttctttgagacaaatcgacgatctcgactaaccaccgagaaattcaaaagttccaaaaccggctcccgcctttcgtgcgcctacaagtatccatcccttccctcagggcttgaatcgtctccacccctccgaacacaaagcatttcctcctgctgcaccgaaaccctaggccctcgttc

SEQ ID NO: 13 - DNA, 750 bp, Cauliflower mosaic virus
  promoter (1)..(750): Cauliflower Mosaic virus promoter (2x CaMV35S)
gtcaacatggtggagcacgacactctggtctactccaaaaatgtcaaagatacagtctcagaagatcaaagggctattgagacttttcaacaaaggataatttcgggaaacctcctcggattccattgcccagctatctgtcacttcatcgaaaggacagtagaaaaggaaggtggctcctacaaatgccatcattgcgataaaggaaaggctatcattcaagatctctctgccgacagtggtcccaaagatggacccccacccacgaggagcatcgtggaaaaagaagaggttccaaccacgtctacaaagcaagtggattgatgtgataacatggtggagcacgacactctggtctactccaaaaatgtcaaagatacagtctcagaagatcaaagggctattgagacttttcaacaaaggataatttcgggaaacctcctcggattccattgcccagctatctgtcacttcatcgaaaggacagtagaaaaggaaggtggctcctacaaatgccatcattgcgataaaggaaaggctatcattcaagatctctctgccgacagtggtcccaaagatggacccccacccacgaggagcatcgtggaaaaagaagaggttccaaccacgtctacaaagcaagtggattgatgtgacatctccactgacgtaagggatgacgcacaatcccactatccttcgcaagacccttcctctatataaggaagttcatttcatttggagaggaca

SEQ ID NO: 14 - DNA, 180 bp, Agrobacterium tumefaciens
  promoter (1)..(180): Agrobacterium tumefaciens Nopaline synthase gene promoter (NOS)
gaaccgcaacgttgaaggagccactcagccgcgggtttctggagtttaatgagctaagcacatacgtcagaaaccattattgcgcgttcaaaagtcgcctaaggtcactatcagctagcaaatatttcttgtcaaaaatgctccactgacgttccataaattcccctcggtatccaatta

SEQ ID NO: 15 - DNA, 359 bp, Agrobacterium tumefaciens
  promoter (1)..(359): Agrobacterium tumefaciens Octopine synthase gene promoter (Ocs)
ctgaaagcgacgttggatgttaacatctacaaattgccttttcttatcgaccatgtacgtaagcgcttacgtttttggtggacccttgaggaaactggtagctgttgtgggcctgtgctctcaagatggatcattaatttccaccttcacctacgatggggggcatcgcaccggtgagtaatattgtacggctaagagcgaatttggcctgtaagatcctttttaccgacaactcatccacattgatggtaggcagaaagttaaaggattatcgcaagtcaatacttgcccattcattgatctatttaaaggtgtggcctcaaggataatcgccaaaccattatatttgcaatctacca

SEQ ID NO: 16 - DNA, 383 bp, Agrobacterium tumefaciens
  promoter (1)..(383): Agrobacterium tumefaciens Mannopine synthase gene promoter (Mas)
atttttcaaatcagtgcgcaagacgtgacgtaagtatccgagtcagtttttatttttctactaatttggtcgtttatttcggcgtgtaggacatggcaaccgggcctgaatttcgcgggtattctgtttctattccaactttttcttgatccgcagccattaacgacttttgaatagatacgctgacacgccaagcctcgctagtcaaaagtgtaccaaacaacgctttacagcaagaacggaatgcgcgtgacgctcgcggtgacgccatttcgccttttcagaaatggataaatagccttgcttcctattatatcttcccaaattaccaatacattacactagcatctgaatttcataaccaatctcgatacaccaaatcg

SEQ ID NO: 17 - DNA, 516 bp, Cassava Vein Mosaic Virus
  promoter (1)..(516): Cassava Vein Mosaic Virus promoter (CsCMV)
ccagaaggtaattatccaagatgtagcatcaagaatccaatgtttacgggaaaaactatggaagtattatgtaagctcagcaagaagcagatcaatatgcggcacatatgcaacctatgttcaaaaatgaagaatgtacagatacaagatcctatactgccagaatacgaagaagaatacgtagaaattgaaaaagaagaaccaggcgaagaaaagaatcttgatgacgtaagcactgacgacaacaatgaaaagaagaagataaggtcggtgattgtgaaagagacatagaggacacatgtaaggtggaaaatgtaagggcggaaagtaaccttatcacaaaggaatcttatcccccactacttatccttttatatttttccgtgtcatttttgcccttgagttttcctatataaggaaccaagttcggcatttgtgaaaacaagaaaaaatttggtgtaagctattttctttgaagtactgaggatacaacttcagagaaatttgtaagtttgt

SEQ ID NO: 18 - DNA, 863 bp, Arabidopsis thaliana
  promoter (1)..(863): Arabidopsis thaliana Actin 2 promoter (AthAct2)
aggagtcgacaaaatttagaacgaacttaattatgatctcaaatacattgatacatatctcatctagatctaggttatcattatgtaagaaagttttgacgaatatggcacgacaaaatggctagactcgatgtaattggtatctcaactcaacattatacttataccaaacattagttagacaaaatttaaacaactattttttatgtatgcaagagtcagcatatgtataattgattcagaatcgttttgacgagttcggatgtagtagtagccattatttaatgtacatactaatcgtgaatagtgaatatgatgaaacattgtatcttattgtataaatatccataaacacatcatgaaagacactttctttcacggtctgaattaattatgatacaattctaatagaaaacgaattaaattacgttgaattgtatgaaatctaattgaacaagccaaccacgacgacgactaacgttgcctggattgactcggtttaagttaaccactaaaaaaacggagctgtcatgtaacacgcggatcgagcaggtcacagtcatgaagccatcaaagcaaaagaactaatccaagggctgagatgattaattagtttaaaaattagttaacacgagggaaaaggctgtctgacagccaggtcacgttatctttacctgtggtcgaaatgattcgtgtctgtcgattttaattatttttttgaaaggccgaaaataaagttgtaagagataaacccgcctatataaattcatatattttcctctccgctttgaatactgtatttttacaacaattaccaacaacaacaaacaacaaacaacattacaattactatttacaattac

SEQ ID NO: 19 - DNA, 822 bp, Solanum lycopersicum
  promoter (1)..(822): Solanum lycopersicum Histone H4 promoter (SlHis4)
aggagaatatcatttttaagtaaaattttgaattcaaatgttacgtgtattatttaattcatcaatttgccttgtcatagcgagtacattacaaacatcacatatatttgattgattgtcaaaaaatatcaaaatatatatcaattttaagaggtataggtgtctaatatgtactagccctaatttaaatatctaaattaattattcggatgaatctatataccatctttttaatggacacccaaaatcacacatcaaacatcatatacatgttgaaaacatattattgatatagctacatatatgttttaatataaataaaagacgagtcatatattcaaaaattaagaatcaaataattttaatttatttaatattcaaaacttaatactatttaaatttagatattctaattttaatacacgtctgataaaatagatgaggactaaataaataatttgagactatcttttctttatttggcggcccacaaataatttagattctcgtaaccccctctttttctctcactgaaaaagcacaatccgtgtccaaacacaaagaagcactcgacaccgtagatctccattcagatcaacggcttatattcagttttctccattcacgtggatcgacattcttatccgtccgattatcaataaatttcccaaaatttagcggccatgattttaaccccgcctcatttcaaaccgcccacgaaatcctcgacgcccaaattcaccaactataaatagccaccaccatccccttcatcaatcatcaaatttcataaccctagaatcatcacctttttcaaatttc

SEQ ID NO: 20 - DNA, 692 bp, Arabidopsis thaliana
  promoter (1)..(692): Arabidopsis thaliana Light-harvesting chlorophyll-protein complex II subunit B1 Promoter (AthLHB1B1)
aggagatatgactggtaagtttttcttgccaatacgaattagaaaacatgtctttgaagatgaactgtattttttttttttactttgttgtcattttaatgtactttcttatcaggattaaatcttctgtaatttagagtagtttttttaacaagataattaacaaacttagagtaatgaaaattgagatgttcagttttcactcatatttcacattttggtgaaagagtgggtagtatgcaacgttctaagtatgtttggactttgtatcatgttgttttgattctttgacgacatgtctatttgggaaacaccaatgacgtgtaccttgagactgatacgattcaaagggatagaaacacgtcagatttacaagtggcacctcttcaatggacaatgggtattccaatatgctaagatgctacgagatatctaatttatctaacacaactcaattccaaaccaaaaatctgatgccagctcgacaagacaaaaaatctaagctcaaaaatgtcaacaaccaatagaaatcaaggcattgacgatatcacgagataagcaaattaaatcttcaagttttgcaattcatatgtacgttataaatacccaaaaacctcaccgtaacctagctatccaatttcatcacatcttattaactaaagagccttttacttgcgccacactctcaccgc

SEQ ID NO: 21 - DNA, 1303 bp, Epipremnum Aureum
  promoter (1)..(1303): Epipremnum aureum ribulose bisphosphate carboxylase/oxygenase activase 2 promoter (rrEaCons1)
acctcaaccttcgctcacagtgaaggcttgaaactcgctttttaacattgtaagtgggctgattttgaactcatctcatcgtaaatctttaagctttgacttcccacgatgttgtccagtctattagattttttatggtttttttttcttttttcgctgaaagttcctacttaaaatagtcacccactaggtacagaagagtcagctacatgaaaaataccttaatatagaaaaacgtatttattgtattaaaatttgaaccctccccacttaaaatgatgcgtaccacttagacctagttgagatttattgttgcacctgggagagagttgaatagggtccggattcccacttagtttctctggaatctagatagggcggtcagctttatcttaattagtgacaaggcactagttggagttagtttttatattgaacatactcttaaacttttagttccctattttgagagaaagtatttgaagtaattttaaacttttggttaaatcttccacttttgaccaaaagttcaaaattaaagtttcccaagttcaagaaagaatggtatcattagcccatataagaactaaattaaaatcagtttgattcattcttattaagctccaacatactcaacagcacaaccaacagcatgacttgtgtaaactgaaaaactcagagagagagagatagagactctgaacgagtggtgctgagcagcagtggctgcttcatgaagagtttggcgtgacgacaaaaccatcaaaaacacagaagaggaatttcattgccgacaatcaccatgtctctgtaatactgctggtcctgatgaaatgcttgaaggaaaaaaaactggcattaaagaggaggggaaaaaaccgaaaattttagtggagtcgggaagcccgggaacccgaaccattcctggcgtctgacgtcctccgctgccgagaggatgctgtagctgatgggccccacttccccacactccccaacttccaacgtcaggacacgactctatctgcgcagaagcaaccaaccctgatgcgccacgtgtcgccccaccccaatccgcagtgtgtggccgttgtggccctcgcgatccaatccacaggatgcttcactctcctcctctcctccgcaagccaaacgggaaaataacggagcagggcagactccagagcctccgcaggccgctttatatataactcgccctcccacgcctcctacggtcatcactgccgcgaggagctttgcttttggtggacgcggcgatctccccccatctccttctcggtcttcc

SEQ ID NO: 22 - DNA, 1167 bp, Epipremnum Aureum
  promoter (1)..(1167): Epipremnum aureum Metallothionein-like protein type 3 promoter (rrEaCons2)
aggaacaagtgccacctgagccaaggcgctcattggcgtcttgatagtttcttttatggtatacatgctgttgtaagaatcttaatgttttaaatttgcatctgcatgtatatatccacgttttggtgtaatatccacgtctatacccttgtgaaaggtatctgtatgcatccaagtatagttaaatcactttttaaaatttacagctatgtcccttgtaaagctataatgacatttttgtgcatctagaaagagtactcactcggggactcttctaacagacaagcacatgatgagaaatttgcacccgcacaattcaaatttgattctgaaagacttgcaacttacaaactatcttaagtacgtacgaccacaaattatctcaagtgtactctttgttccacaaataacttttacattgacactatttaaggacgacactgatcagagataaaatgacaaaatgaaaggggactcatctaagttagacaaatcccgaaacttatttcatataccctaagaacacttgcccccctaattaacgacggtacatgagtaacatgtttgcttttcacatgaatacaaatggcagtacatatatgtaagctagcaagaaggatatgtgggtgataattatctgtatatggtccgtatccacctccctctctagtatctccatcacgtagccagaggtcatcggatttgtacaccagttgcatgtgcctgtgcatctgttgccagttgcgtgtgacagtgcagctgtgtattgccacaaaaaaaaaaggaataaaaaggtagtgcaactgggtaacggtgcaaggatagccgtgtctgcccatctgaacccaaaagggcgacgacgacgactcggggaggtgaaagaagaggaactggcgtgagagctggtggggcagcccccctcctctccaccataattgagattcctttggaagcttcccccatggaggcgtgtgcccgtcacacacaggaggcagaagcccttcccctccatctctccttgtgccgtgtgcggctgcccatccaacccctggggcctataaatatcgtcgcaggggcagaagcccctccagcatagctgaagcttgagtagttcagagatatagctctctttgatctccagagaggctccctcctgacatcaccacc

SEQ ID NO: 23 - DNA, 929 bp, Epipremnum Aureum
  promoter (1)..(929): Epipremnum aureum abscisic stress-ripening protein 2-like promoter (rrEaCons3 or P16)
gttccactcgaggcaggaaaaatctctggatttggacacttaaccgacccccattaacaccccacctcacatcagagcacggtttgcccactcaacttgtcaggcaaaccacatcttatctcaaaagctatgagttacaacgtcagataactaatttaaataataatataaatttaaaatataaattatattttttattaaattaaaagaataatattttttaaatatctaattttatccaatcaaattcaagttcaactgatctatattaaataaaaaaattaatacgaatccaaattttaagttgacaaataaatgaattttgaataaaagaatcacaaataaaaaattacgttttcttggcgtatatcaccatgcttgtcttcgtttaagagatttaagcaatcatggacgtctgcttatccacggatgtgaaatattaaatgataaaatactatattatcttatattatagaaaaataaattttaaatgagaagtgggtatttattatgttttcattcaacatacgtgcgaaagttttatctagatagattagcgttagcatcactcaagaattttttttattttcttaactgcttcaaaaaaagaaatataaagggattggcccacgttaattagctagaaaaagtgggattgaaacgggtgttatccacttcacattctgtgagcgaatccgatgcgtgaagccccgccatcctgacccgaccgctgttcccccctacccacgaagaagccgtctgtccgtctcttcaatctctatacttccccttcgcctgctgcgtacactcccgtggctataaataaccaccacagcctctctgatttcttcgtacccattactgcaacacctctacagctactagccgtgtcgcccgcccccccttaaggtcattctaccactgccagt

SEQ ID NO: 24 - DNA, 841 bp, Epipremnum Aureum
  promoter (1)..(841): Epipremnum aureum RNA-binding protein cabeza-like promoter (rrEaCons4)
gcaacaatgacgcggattcagcccgccaaacagataccattaactcggttcacttgtttaagaaagcgttgtagatttttttttaaaatttattaataaaattttaccgcccccaaagcccaaactaatgttatcaagttggaatctgaaaaaaaaatagattcgagagaaagatattaattcaatcaaaatacaaataattcatgaaaggttctgaatgtatcgtcgatctttaatataattaaatattaattgtaaatcatataaaaactattaattgactagttccaatagccagtccttgtcactcttggctgcattgccgggtatcggatattggcaccgcggagaacgcgagaggtgcctcaccgccaacatggaaggcgcttgcgcctttcggttgactcccgaggtaaacaaggggccaggggcatccacgtaaacacgccctcccccgggcccaggggtatccacgtaaacacgcccttcagatatgtctgtgtcgcttgcgcggtccccgccccgctcgttcccttccctgtgataagcacaaagccacgaaccctgttctgggcctaaacgggccaccaaacgatcgggggatccaatccagcacgagttccactgttccctcaccccatctaaatcttaatttgctccagctccacgagggtaccattacacagctcccgaaaacgtccaccagttcgcacaggctcgtcgaggggaacacgatagtgtctagtgcggggtccatgggcccatccagtactgccggccagtccacgaagcccaacggggaccctggttgaacccaagcgtggggttacaaacgctcgag

SEQ ID NO: 25 - DNA, 906 bp, Epipremnum Aureum
  promoter (1)..(906): Epipremnum aureum leaf patterning promoter (rrEaAs21)
gctccgtcccttttcccttttctttccatttctaccatgcgtgtcagcgtgtgcgtccattgctcgaactgtgtctgcacgtgttcatgtgatcatcagaagtcttgttcgcaggcccaccgttttcgatttggagatccccggacataatccggaagagatcttcttttttagcacatgaacatacagtaatgcgagaatggaaggagtgagaaaatatcctttgaatcccggttgcatcccgaatcctaccgagaaagagaggatctctatctcaagcagtgtaagaagagctcacggtggtctttcccgatcatgtccggaggcatgtgatctcaagtgctgtggtgcaagtaatccccttagaaggttatgatctccgttccgtatccatcaccgtctttcgtacttcatgggtttctcttcccttctctctcctatccgtgtatcttctcagatttgtatgggagatactgtatggggaggagtagagtctgggttgtattcagttccctccattgcccttttagacaagagaaaggaaaaacagtgaattccatgtgttcttctgtccaaccgtgtcgccttgctgcgaatagtcctagcaattgcactgttgccatgccttcctgtcactgtaagatgacactctactctgtgtgtcttttttggtattatctctaagggcaatccgcacacgttcccgttcatttacttcatgtggaaaagaaaaaagtttgtttctttctgaaaaaaatcatggaagataattgttttgcccactcatttgctactatatattctaccttaatttgtttgcaacgggtcaggttgtttaaatctgactgtttaaaggctctatcttttggacaggaattgatcatatataagcagccgtgtgtggtt

SEQ ID NO: 26 - DNA, 980 bp, Epipremnum Aureum
  promoter (1)..(980): Epipremnum aureum leaf age dependent promoter (rrEaKan22)
ccatcgctattcttgtattgtcacgaatgccacccctagataatttatttgtgaaaatatctttgaaatacaatttttgtgcataaattctcaaaagatggcattcatatgagaataagggtgacaaatgcgtaatgtaacaatgacatatttgtaaaaaaaattcatatctaattttccaacattaatctatctaaaatattataatatcatatctaatagatgttgaccatacgtgaggcatttggcactaggcctacccaaggaggatgcaaatgtgtttttaatggagttactttgcacatcttttatacaaggggggcatcgttacaaaaactcaaaattaacttgtgagaggccggctttatctttttatggcccgtaaagcggaaatatgagaagtggagaaatggaataggagacaggaaggaagggatgcacacaaagctaaaatgttagatcagaacttcactttttatcaaaaagaaaatcagtgggaaaaagaataaaaaaaaagaatcgaagccttctctctctctctctctctctctctctctctctctctctctctctccttctatgtgtgtttgtccacaccccacgtccacaaaagaaacatactcctactttctcctctatttctctctcctggcagccaagaccattcataccgagtgtcattttcctgcacatacttccccttcatacaagaagtaaccacttccactctccccgtttcaagacatttacctcccctccaatccctcgttccccaactcccctcccaaaaccttcctgttcatctagaacacccatctgctccacacctcctacccttcccacactcccaacgggaagaagaactcagtgtacgagaagaaacccagagtcccgtctgcggcggcgcaggcggagggtagggagggagggagagagagagtgagtgtgtgtgtgtgtgtgtgagagagagagagagaggt

SEQ ID NO: 27 - DNA, 849 bp, Epipremnum Aureum
  promoter (1)..(849): Epipremnum aureum leaf age dependent promoter (rrEaDPA41)
tgctccaattacatttgccatctgaaaatatatgccacagtctggttaatttttaaagaaaaaaaataatattccagcagaagaatggatcgctggatcaagttttttttctgcccaattaaaagttgaaatggtggtccaaaatgatttcttattcggaaaattgaatattttaaaataatatatatcgtactgacacgtgagaatagcgaaaaggacgagctcacatgagcctaaccagatggtgcatggtcccggtccagctctcccttcccgtctttgcacggctccaattcctctcccagctttatctcttccatctcggttccctttcatctcttctccccagctgtaatacgagaggaataccagtgcaggtactcgcgcttcggcgtctctgtccgccgctcctcctcctcactccttcaccagatctgttataagctgaagcctctcaaaccctaatctcgaatgtccccaggggtatgagcccatctgcagcctttccatcccagagatcgatgggaagccatctaatcctgtagttctgcctgctatagcactgagcagcgggagagcaggccatgcaccgatccaccccttcggctgtatcctcctcctcttctgatctcctcttctcccccctccctctcgttgtgcaagcagttcagtgggatgcccgcatctctctctctttcccccatattctcccctccgcccccgctttccgtttctttctcatcttacaggtgtagagagagagagagagagagagagagagagagagctgtgagttaacacagtaaaagaaggcgtaggatttgcacagtcgtcgtctgtcgtctgaga

SEQ ID NO: 28 - DNA, 967 bp, Epipremnum Aureum
  promoter (1)..(967): Epipremnum aureum salicyclic acid stress responsive promoter (rrEaPR11)
ggaattcccacagaatcagattcgggtacaaatgcgccaggaggaatacacgccgcccaaggttcccaaactacattattaatacaagccttaattagatcaagtgatcccgtcagtgataaaaataataaacaaataatatgttaggtttttttatttttttatttttataaaaagaatattgcattaaacctgtagttaatttatttatatataagctttaatgcaacagagagatttgttgctaaaattttgtaaggagcttagattattatgcccctcttttttcatagggtgagaggggtcctccttgtagtaggtttctagaattctaaatagtcacttaatcaagtaaattatagttcaaataagtgaaatggatgtttaattaggcaaaaatcagatctgtaggacagaaatttcttaattagggacataattaattacgatcttggctttcatagaacattataatataaatatttaactgggaaccaaaaaaatctacaaaggtgtactttacacagacaaatttcacaatgttttttcagaatatataagatttttcttagagatatagtaaagctcacttaataaaagagatcacgagataagatctagttgatgataataattattataatactttatttaacaaaaattaaaataattttaattattatgataattataaaaatatttataataacatctttcataaattaactctaagttaatttacacggttgtggttatgattatttaaaaattaaacaaagattaacaaatttataattataattaatgaagttgtaaaatttaattagaataatctcaactacagtatcaaacagtcgacgttgttggtggacgttcccagtagagagaaagagagggagagagagagagggaggtgggcgggggaagagagagaaagcggaacccggacaaacaactacaaagctcc

SEQ ID NO: 29 - DNA, 951 bp, Arabidopsis thaliana
  promoter (1)..(951): Arabidopsis thaliana quick response stress responsive promoter (rrAtZat12)
aaggtataacgaagatttgttccgcgtggaaaaggcattaaaagtgccacgtcactctctctttttattttatgattttcgtatctcttcttctacttgcttcccacgtttccatcaagtttccgtacatatcttcttgttatctgatccacgcgatctttcaacgcgtacttttcacgtatttgtgttgtcatgcctttgctgggattgtgttagatgctcattgctgacggtagtttttagagaacattctagaaagaaactatttttctaacaaaaccacgaactttgttttctagttattccactttctagaatacacctgaccaaattagaattctagaaatgaattttaaataaaccaaaacacctaaacgaaaagcaaaccataggtttttggttttaacatatttcaaattcataaaagtgaaaccaacctacaccatattaaccaatatttattagagtttttatatgttttatgatattgttcaaaacttcaaaagagatttattcatataacatacctataccataccaatgaatattaaaattatgaattagtatccttatattatatgaagtcaatcaaaaaacttagaagcatttcaaacggaatcaaaccattcatatatgaagtattattattatatctagaaggtgttgattttaaactattccgtataatatatctagaagacggctccgcgcgtggggaatgcatcaaactcagagagtttaatagctttttttggttgacgtcaactactcaaaagagtttagtttttgatgtgtatatatccaaataaaatatctttaaaaagaaaataataataataaatggtttcgagaaaacacgaggaagattctcatccaaccgaaacgactctttcgtttttagtagtctcttaagctacgcggtgtcgcaaatcgtgaccacataacccgttt

SEQ ID NO: 30 - DNA, 942 bp, Epipremnum Aureum
  promoter (1)..(942): Epipremnum aureum auxin signaling responsive promoter (rrEaPin12)
gctacttctttcagccacgcactgcgcttcaaaacttccacggtaccatagtcgagtttgacgagaaaatgtcgaacttgtggagaggaagagaaagtgatcccatgagaattcagaataaatccaagtagcagatgaacagtactcgtattgatgcgctacgtaacgtataatacctggcgaaaaccataaaacccaagagagcgaatcttaagaagtactgttgtttttttttctggggacacggtgagaagagaagcctagcgttctcccccaaacagagttctctctcctccctcccctcctgtctaagttctaaaaaggtggcgtggtcgggcacattgcttcgtctcttgcttcccgttcctgaacccatttaaagcaggtgttgctttgttgtctgcctacagagctccacaaaatagtaagcagatacacaacaacacgtacgccatcgccataactctccttcgcctctcccagttgctggttacatctgttctactacgagcacctgtcccccattttctttccctcctctctgctttttccctgtttcgcgctctgtcaccgcttctcccttctctttccccctctgcactgatggttaacgtgcttaaaatcacttcagttgtcctcttctaataagcagggttcttcattgagaagaatctccacaggtaagcaaacatcacctcgttaggcttctcattccacttcttcacaaagggtccaccgcaaacccagatagcaagccctgcttcgtcgtttgcccctgttccatttccatttccacccggggtcactctcagtcatggtttcccgggggaagcagtgagctgctttgttcttactgaagccaggcacacagggccttccaccaccgccaccgttctccctcgttccctgcatcagaagagccacgtggtgttcttgcaggat

SEQ ID NO: 31 - DNA, 755 bp, Rice tungro bacilliform virus
  promoter (1)..(755): Rice tungro bacilliform virus promoter (RTBV)
agtagtaatatttaatgagcttgaaggaggatatcaactctctccaaggtttattggacacctttatgctcatggttttattaaacaaataaacttcacaaccaaggttcctgaagggctaccgccaatcatagcggaaaaacttcaagactataagttccctggatcaaataccgtcttaatagaacgagagattcctcgctggaacttcaatgaaatgaaaagagaaacacagatgaggaccaacttatatatcttcaagaattatcgctgtttctatggctattcaccattaaggccatacgaacctataactcctgaagaatttgggtttgattactacagttgggaaaatatggttgatgaagatgaaggagaagttgtatacatctccaagtatactaagattatcaaagtcactaaagagcatgcatgggcttggccagaacatgatggagacacaatgtcctgcaccacatcaatagaagatgaatggatccatcgtatggacaatgcttaaagaagctttatcaaaagcaactttaagtacgaatcaataaagaaggaccagaagatataaagcgggaacatcttcacatgctaccacatggctagcatctttactttagcatctctattattgtaagagtgtataatgaccagtgtgcccctggactccagtatataaggagcaccagagtagtgtaatagatcatcgatcaagcaagcgagagctcaaacttctaagagagcaa

SEQ ID NO: 32 - DNA, 870 bp, Agrobacterium rhizogenes
  promoter (1)..(870): Agrobacterium rhizogenes promoter (RolC)
aaagttggcccgctattggatttcgcgaaagcggcattggcaaacgtgaagattgctgcattcaagatactttttctattttctggttaagatgtaaagtattgccacaatcatattaattactaacattgtatatgtaatatagtgcggagattatctatgccaaaatgatgtattaataatagcaataataatatgtgttaatctttttcaatcgggaatacgtttaagcgattatcgtgttgaataaattattccaaaaggaaatacatggttttggagaacctgctatagatatatgccaaatttacactagtttagtgggtgcaaaactattatctctgtttctgagtttaataaaaaataaataagcagggcgaatagcagttagcctaagaaggaatggtggccatgtacgtgcttttaagagacgctataataaattgccagctgtgttgctttggtgccgacaggcctaacgtggggtttagcttgacaaagtagcgcctttccgcagcataaataaaggtaggcgggtgcgtcccattattaaaggaaaaagcaaaagctgagattccatagaccacaaaccaccattattggaggacagaacctattccctcacgtgggtcgctagctttaaacctaataagtaaaaacaattaaaagcaggcaggtgtcccttctatattcgcacaacgaggcgacgtggagcatcgacagccgcatccattaattaataaatttgtggacctatacctaactcaaatatttttattatttgctccaatacgctaagagctctggattataaatagtttgaatgcttcgagttatgggtacaagcaacctgtttcctactttgttaac

SEQ ID NO: 33 - DNA, 1915 bp, Oryza sativa
  promoter (1)..(1915): Oryza sativa sucrose synthase I gene promoter (RSs1)
caatccaccaaatcaaaccgtgagatttttgcagaggcaaaacaagaaaagcatctgctttatttccctcttgctttcttttcatccccaaccagtccttttttcttctgtttatttgtagaagtctaccacctgcagtctattattctacagagaaaaagattgaacctttttttctccaaagctgacaatggtgccggcatatgctaataggatactcccttcgtctagtcccttcgtctaggaaaaaaccaacccactacaattttgaatatatatttattcagatttgttatgcttcctactccttctcagttatggtgagatatttcatagtataataaatttggacatatatttgtccaaattcatcgcattatgaaatgtctcgttcgatctaggttgttatattatgagacggagagagtagattcggttatttttggacagagaaagtactcgcctgtgctagtgacatgattagtgacaccatcagattaaaaaaaacatatgttttgattaaaaaaatggggaatttggggggagcaataatttggggttatccattgctgtttcatcatgtcagctgaaaggccctaccactaaaccaatatctgtactattctaccacctatcagaattcagagcactggggttttgcaactatttattggtccttctggatctcggagaaaccctccattcgtttgctcgtctctgaccaccattgggtatgttgcttccattgccaaactgttcccttttacccataggctgattgatcttggctgtgtgattttttgcttgggtttttgagctgattcagcggcgcttgcagcctcttgatcgtggtcttggctcgcccatttcttgcgattctttggtgggtcgtcagctgaatcttgcaggagtttttgctgacatgttcttgggtttactgctttcggtaaatctgaaccaagaggggggtttctgctgcagtttagtgggtttactatgagcggattcggggtttcgaggaaaaccggcaaaaaacctcaaatcctcgacctttagttttgctgccacgttgctccgccccattgcagagttctttttgcccccaaatttttttttacttggtgcagtaagaatcgcgcctcagtgattttctcgactcgtagtccgttgatactgtgtcttgcttatcacttgttctgcttaatcttttttgcttcctgaggaatgtcttggtgcctgtcggtggatggcgaaccaaaaatgaagggtttttttttttgaactgagaaaaatctttgggtttttggttggattctttcatggagtcgcgaccttccgtattcttctctttgatctccccgcttgcggattcataatatccggaacttcatgttggctctgcttaatctgtagccaaatcttcatatctccagggatctttcgctctgtcctatcggatttaggaattaggatctaactggtgctaatactaaagggtaatttggaaccatgccattataattttgcaaagtttgagatatgccatcggtatctcaatgatacttactaaaacccaacaaatccatttgataaagctggttcttttatccctttgaaaacattgtcagagtatattggttcaggttgatttattttgaatcagtactcgcactctgcttcgtaaaccatagatgctttcagttgtgtagatgaaacagctgtttttagttatgttttgatcttccaatgcttttgtgtgatgttattagtgttgatttagcatggctttcctgttcagagatagtcttgcaatgcttagtgatggctgttgactaattattcttgtgcaagtgagtggttttggtacgtgttgctaagtgtaacctttctttgcagttcctgaaattgagtcatg

SEQ ID NO: 34 - DNA, 947 bp, Arabidopsis thaliana
  promoter (1)..(947): Arabidopsis thaliana sucrose-H+ symporter gene promoter (AtSUC2)
agcttgcaaaatagcacaccatttatgtttatattttcaaattatttattacatttcaatatttcataagtgtgattttttttttttttgtcaatttcataagtgtgatttgtcatttgtattaaacaattgtatcgcgcagtacaaataaacagtgggagaggtgaaaatgcagttataaaactgtccaataatttactaacacatttaaatatctaaaaagagtgtttcaaaaaaaattcttttgaaataagaaaagtgatagatatttttacgctttcgtctgaaaataaaacaataatagtttattagaaaaatgttatcaccgaaaattattctagtgccacttgctcggatcgaaattcgaaagttatattctttctctttacctaatataaaaatcacaagaaaaatcaatccgaatatatctatcaacatagtatatgcccttacatattgtttctgacttttctctatccgaatttctcgcttcatggtttttttttaacatattctcatttaattttcattactattatataactaaaagatggaaataaaataaagtgtctttgagaatcgaacgtccatatcagtaagatagtttgtgtgaaggtaaaatctaaaagatttaagttccaaaaacagaaaataatatattacgctagaaaagaagaaaataattaaatacaaaacagaaaaaaataatatacgacagacacgtgtcacgaagataccctacgctatagacacagctctgttttctcttttctatgcctcaaggctctcttaacttcactgtctcctcttcggataatcctatccttctcttcctataaatacctctccactcttcctcttcctccaccactacaaccaccgcaacaaccaccaaaaaccctctcaaagaaatttcttttttttcttactttcttggtttgtcaaag

SEQ ID NO: 35 - DNA, 1321 bp, Arabidopsis thaliana
  promoter (1)..(1321): Arabidopsis thaliana 5-methylthioadenosine nucleosidase 1 gene promoter (AtMTN1)
cagcgaaaacacctttgatgggagcggtatcaggaggctcttgtccaataaattcgaattcgataaggtaaactaccatacatatatatgttatctagcttttatgctaaaggaaaactttttaaatgatggtaacgagtgatgatgatccggaacggtttggtcgcaggcactaaacgttgccatggagacgattccaaaagaccgtcagggtaaggtgtctaaaggatatctacgagctgtgcttgacactgttgcaccatcggccactttaccaccaataggcgctgtgtcccaggtaaataatgccccgtctaaattattttgtcttttaaattgtttattttgcctttgaatttacatgttacaattatttgttaaacaaatgaaaccagaattagtgttttaatcaaaaattattagtgaatttttatttttattttttgaacggcattgattagttaagtttgtttttgtttataagatggataatatgataatggaagcgttgaagatggtgaatggagatgatggaaatgtggtgaaggaagaagagtttaagaaaacaatggcagagatattggggagtataatgttgcagctcgagggtagtcccatatcggtttcctctaactcggtggttcacgagccgctcacctcggctacctttctgccgtcaacttcgactgatacagaggagccttcaaactaatcatagaagggaataagcagcactagcagcaacaaatgttatatggttttgacttttgagtgtttacccccaaaagttttagattaatgaggaaaaccgtctttactttcagatgtataaaattgaaagtttggggtttcctcttgttggtgtggtgattctactcatgccttttttttttttttctaatgaccatgggatgcaatgtttactctgttttttaatttcgttaaaatttgtttacgtttatgatgcttgaatggctatgatgaaacatttgagttatctttaaaagtgtgaaataaatattctgaagttaattgaagaatttgaaaatttgattacaagagcttggctaaaactacaaggagaccagattagtacaaaaacttagctaaatttaattaattacggtcattagcacaaaaaaataatttgtttttattatattattattggtaagtggaaacacaaaagaggaccaaaaggtccaaaaacgaataaactgtatctctcattcgccggagtttccagccgtttctttccgattctcggatttttcctgggaatcaaacgcatcgccgagaatcggaagagagggataaggtt

SEQ ID NO: 36 - DNA, 3093 bp, Cucumis melo
  promoter (1)..(3093): Cucumis melo galactinol synthase gene promoter (CmGAS1)
tctagatgacttggattaattctctaacaagaatttagtttaattgacatttgtatgtttgaggactaagaggactttagttttaatttctaatctaatttgtactagaaaagaaaaaaaaagagtcggattaattctctaccattgagtggaggatacttggatgcagttcaagttctcatctctccaatttgtcacgtgacagcggatgattaagcatatgagtaggctgcaaaagattatagacgtagaagatgatacccaatacaaaggcgtaacttttcccggatgacttttatactctttacaaaattggaagtcctattctatctacatcttaatttccagttgttataatgaagaatagtctgaaaatgatatcaattttttctttctcaataccattcaattacgttaagattattaggagctgccattattattattattattgttgttgttattattattattatgcaaccaagtttgatttgaaattgtttgccaaattttactccaatttgatgttgtttaattactttagatggtataataagaatgaagttgaatttaaagaaaagaaacaaagcttgaaagaatggaatacttaggtgtagaagaagacaacgtatttataacgtcgtatagtgtaaataaaaatgcacacatttggatgccctttatgcttcttagaggtcagactttcccacaaaggctaaggtgattcaatcgtgtgggacatcttgttctcccatttgattctcgttttcattagaccaaaattaacaaaaaaatagtaataattctattctttttaaagtttgtgatattacggtttatcctttgttaaaaaagtttatctttgaatgtaagaatttgatagaatgttgaatgaaaattaagattttgaaaagttttgctgaatttcaaataatataactctctaactttggtttaggaaaattaagtgatgacaattatctctattagaattagtattataagtgatatttgagttatgcacttgacttggtcgtgttggtaaattctttggatacagaacaaaagaagttgcatgccaagaaagatttctaatagatatggtgagatatgtggccgttggctctattggattggtggtatgttccagagaagaggagtgcgtatggatacgacctaggtggataaatgattatatgaggagatggtaattttatgaaatgtgttagagctttgatgttaatatatattttttaagtgtgttttgtgatcgatggtattagatgagttccttattaaacatgttttcttggtttttctcgaggtggggttctcaacacttggtaacatgcatcatgtccacgagatgttcttcatcttatctcttgtaatattatatatgatatctcacacaatacaggttcgtctgaaaaatctttctttatttgaaattttttaggtatttattcttgaggatttttttattcttaagtaaagtgttcatgatttgaagttagaaatataggagttatttttaagagagagtctcacactcaaagggagtctaaatatcttttttactaatttaggttgtgtaataaccttgtatttatcgataagtatcacgatgtaatcatttaactatctattaacgaaaatcttttttaggacacgttgcctcctagatagatgcaagttgtattgcaaaacttgtactctgttttttagttttttacatgttttactttagaactaaacctaagttatgttatgtgtcaaataaacttctttaaaataatattaaaacttctcaaaataataggaaaaaaaagaaaaatttcaaatttaatatatatatatatatattgtaatattagctttcattatcattgaattaaaaattgcatatacaagaatcgaataatgtggagaaagtagttttcctttttcaactttgtgtagaggctaagtctctaaaatattggcttcgactttgtacttttggatccgccaccacaatcagacaaacttccatttgatcattacctttatcgaatcaaattctttcccttccaatctgtcacaattttgaacataccatccaccttctgattttttgattctaaataaaccttattagcagagatttttaaaattagtattaaattataccaaataccctaatgaactttttcaatagtttttctattttattttttttttcttttgtgtgtatgagttttttcaccaccattagaaaacacatttgaaatatacagaaccaaattgtttaatttgaattggttttccataccatttttacaaaatacatagtataaccaaaagaactatagttttaagtagtgtataatagtttaattttaaagacaaagaactaaacaataatcattatcaaaaacactaccttaaaacagaattgaaatcaaatccatttgtttaggaatatatatatatatatatatatatataatatagtatcataatatataaaaaaaatgtcaaaatctgagattctttgatcctccctaaattgtccatttttgtcttgcctacaaacttgcaaaaaagaaaaaaaaaaaggttcatagatagaaatgacccataattgaatcataaagcaataaggatatacaaaattattatatccaagagggatgagagataatcttaaaggtgcaaaagaatcttcttattgatggaagaagagaatacaaactcttccaacttttgatcaaaatgcccataatgccctccatctcaccttaaagataggatattccaagtcatattcatcccaccaataccaatatctaaaataataagtaacaaataattacaattacaaatataaagtgcatagaaattaaacttaggggtatctataaacttaaaacaatgttccccaaggctctataaatagcctccttcccatcccttcacaactcaagcttgaaggactaaaacaagaacttgtaagcttgcccttcttattaagtccttcttgcctcccttccttcggagagaaaaaacttttgttgtttcaaaagcaccaaagtcaatatgtctcctgca

SEQ ID NO: 37 - DNA, 887 bp, Epipremnum Aureum
  promoter (1)..(887): Epipremnum aureum (rrEaLeaf1 or P18)
agctacgctctttgtccacaatgtgacaaggaatgagaacgagtcagcagtagatcatctggcgcgctctctgattggtgcgttcacctcccgtacccatgggcacgcacccgagcaggaccgggcacccccagtgagcccctcacatccatttcctgccctgtcgtggagtgcagtctcttcgacgtccccgccttataattaattacctgtgcgtattcgtccgcacgctactgtgcaacgattccaccataggatatatgaggggcttatgcttatcatatggagttcaaattttcttttttatttttttttattttttaatttttttattcatagttctagttggatttttgatattagagcaggtctttttacaaagatgctatttttgtgaattaaatttacgaatttgtcatctttattttaatataatcataaaaatatgtatgataatataacataaattcatgtgcaacaatgacatatttgtcaaaaaaaaattattaaaataatgattatggaagaggagaagatatagaattaaaaaatcagataggacaagagaagaagataaatcagaactggccatcctttgaattcaagtttgtttttagtttatttaatttttaattaattttatgtggtccgaccacagaaaaagaacaaccctaaatttagccttcaatacattactgtggtgcgaggaagctgcgtccccatatgcccatggcgtgtggagctggtacgactgcttctgtctcgacgtgcgttccccccggaagaaaaagagaaggaagtgacgtgagaggtccagaggcagccgaccttctcctccattatcgggagagattcctctcgggactcccactcgcaagagccctctc

SEQ ID NO: 38 - DNA, 1068 bp, Epipremnum Aureum
  promoter (1)..(1068): Epipremnum aureum ribulose bisphosphate carboxylase/oxygenase activase 2 promoter (rrEaLeaf2)
ttgttcagaaaggaaccccctagtttgtaattggaggtcataagaggtactttcagtcctcaaaatttatcatttcttaatgaaatttttaattttaaaagatttattctttttaataatttttaggttgagatcaagtaaatttagaagatgattttgacaacgatttttttgaagtagataatcaaaattaggagttttaagaatgataataattattattttaataaaaatttaaactcaccttctataaacagatgtctctcattgtaccaaaaattttagatttacatattattataaaaatatcttttcattttataatttataaaaatattttttaaaattaatttatttcaaaatctatcatgagctgtcttaagataagagttgcataattataattattttttaattgtaataaataaatatccatactaccctcatgttaaaaaaatatatatatatatatataaaatcatccctccccctctctctctcctcgtctcttatgtttctgaatcacatttttttaaaaatattaattaaaaataaaatatttttaaatgttttaagtataataatatctaattaaattttttgaaaacattttttaaattattttataaatgataaaagagatctttttgtagtgccagctcgtaacaaggtatatttacgaataacccttccttttattgcagacacctcggctgagagtacgcagtagatgacgggtcccactttttttccccacgctccaaatagctccaacgtcgtcaggacacgacttatctgaacagaagttatccgccctgattgcgccacgtgttccggcccaatccccactgtgtggccacaggaccctccgctctccccctctcctcccctcccctccgccagccagagggaaaaggaacagaacagggcgatctccagaacctccgcaggccgctttatatatagttcgccctaccccaccgcctccggccaacgctgctacgaggagctgagcttttggtggaagcggcgatcccccccttccgccttctaggtcttccgggtccc

SEQ ID NO: 39 - DNA, 1013 bp, Epipremnum Aureum
  promoter (1)..(1013): Epipremnum aureum hypothetical protein AQUCO_03600155v1 promoter (rrEaLeaf3)
gtgcgatccctctttccctccacaaattaataaagcctgatttgggttttgatcacagaagatctgtgttgcttgatcgatgtgttgataaagactaaaaagaaaaagaaatcctcgatctattaatttaatttttaaacaataaatttacctattctctttccattcccttcagtcttcatggtttcattaatggcgttatatgcccttgtgagagatttaattgcgtaactatctcttttagatttgcatcttcacgcgcatgtcatcctcatgcggcaatgtacctatctatccctcccgtgagggtatatatacgattaaaagtatcatcaagatatttttaaaatttacagctatacacctcttaatgatataatggcacacacgtttgaaggaagagagtgtatacacacgaatgtaaatttagaaaggatattcatgcaagtgggactctaatagacatgtatggaaaatgtctgtttttttttaacccatatccaattcactcgagtataaatgaaggtgataattatttgcatgtgcttggcctttttaatgtaaatttggtttataccagtggcatgtattcaaacttcctttatttttcggtctgcatccatctccctctctctggtgtcttcttcttcacgcagccagaggttaagggagttgcgtgtgcaagtgcaactgggcaacagtgcaagcatagccaaagggaagaagaaagaagaggaattgacacgagaggtggaggggtagcccccctccttccccaccataattgagattcctttggaagcttcctccatggaggcgtgtgcccatcacacacaggggccctcccctcccctcctctccttgtgccgtgtgcgtccctctgccatccccccctggggcctataaatatcgtcgcagggtggaagcccctccaccatagctggagctgacccctgagctgagagatatatagcagaagctctctttgatcatctctagaggctcccctctgc

SEQ ID NO: 40 - DNA, 1114 bp, Epipremnum Aureum
  promoter (1)..(1114): Epipremnum aureum carbonic anhydrase 2-like isoform X1 promoter (rrEaLeaf4)
cgcacgtagccttcgttactcatcttgttgttcgtctaatttggagagatggtttcaagcatttgacaatccaaggagacaaagtcattagtattaatgtttctctgttaattaattgtctccctgatatcctgtctcaagtatgtttatgtgtgtgtgtgtgtgtaaatataaatataaagaacaatatgtgataaaggataaccattctgcatggtggatttgtcttcattaattaatatagttctttctttccatcatttgatttcatttcatacactagtactttggtaccatgtttatttttcaaggtttatcgaacaggaattattcagaagatataccaaaaatcgattggattcattctctattcagactgttaattgttaaccatcgatttaaacatgtcatcttaagggaaattaagaaactagattgtgtttacgttttccacactgttagaccttctatagtatcttcattgttctcgagtcgattggtagtattggaacgaactagcatgcatgtgtggaacaccccctcttatatactgcaaaaaatgaaaaagaaaagaaaatggaccatcactttgattttttagggtttggtggcttcaagacacgatgcttggctgggtgcaattaaactgtgccataaaaatgtactatgctattcaataatcgatttcatgagacatggtacatgtcatatttcataaatgacgtggtacatgccaaatttcataagttttcttgtctagaaacttaataaattactattcgcatagaaatcctgaatttttactatttctgatttcccccacccccagaattttaaggttgaagctatcagaaaaacaagaattattatatataatccatctgcaatgcatgagattagcgatacacctgcaacgccatcacctattccatccaacgattacatgacactgtcatctccaagccttctctctctctctctctctccctctcccttatttgaagcagaagccatggttgatccggctttcgctttccttatcctaacccacccccgtcgcagagactatatatcgagccctccacccctcctgggacgggtgtgaaagagagca

SEQ ID NO: 41 - DNA, 907 bp, Epipremnum Aureum
  promoter (1)..(907): Epipremnum aureum beta-galactosidase promoter (rrEaPetiole1)
ttcgatctccccctcgacttgaaaaaactaataaaaaaatgtaaccttatatttttccgtaagtaaaacggaaagtatatttaatagaatataaaaaatctgtaatttaattattattcggataataagagaaagaagaggagggcaaaattatgggagttgatggatggatgatgctgccacgtcagaactcggaccgggacgtggccggccgggtggcgccggtcctgcccgcccactcgctttcaccccacgccctttaaatcccacccggcgccccgtttccctcgccacggccatcaccaccaacggcctctctctctctctctctctctctcgcgatcttcacagccacttctcactccattacgctcttgtttactcctcactcccatctccttaaacgcaagcgactgcaacccaaaccacgctcttccattggcctcgtcctcctctctcgtatcccgaaagcgagagaggaccggccagagaaaggggacagaagaaaaaaaaaagagtcggagggagaaaaagagtgggccgagcgagaggagttggagagaaaattatactgaagagcaccctaaagcgggcaaggaatattgctggggagttgggaggagagaacaaaacgagagaaggaagaaagaaaggaagagggagacgcgcagtgttacaaggaagattaggggataaaaaaagccgttttcttcttctctgctgctgcgaggtcgctgaccgccttccttagactcctctgctggacgcactacttcccatcttatcttagctttctccaacctttagcttctgacacattaaagaggagggaatatagaggagaaaaaaaaaagatcgtcggaaggaagaaaggaaaaaaaaagatccaaccaggtttctgcggaag

SEQ ID NO: 42 - DNA, 928 bp, Epipremnum Aureum
  promoter (1)..(928): Epipremnum aureum vacuolar-processing enzyme promoter (rrEaPetiole2)
tggttgaagtgctaaatttggcattgcctcaattttgttactaagatttttgtaatatcaaaaattaatattataattaatttaacacaaagttgaaataattcagatgatcttgtcaaattattaatactgttgatgatattacactatttaataaaagaaccatatgccccataaaattaactcggccttcactgaagaatgatcaagtggtcattatgtaatcatctgaaactcagggatgatacatacacatacatgtctaaaactcctagaaactgtagttaattgcacccttttgccactgcattatttcatctggtaccaactgacatggcatcccctgtccacttgctattggatcaacacgcccgacttcttacgtcgccacgccggggcccacctagataggaactatctgcttgatcccgtcgaatcagcagcgttccaagcccgctcccccatcggatagatattaaccgtcggatcaatggatccatcgtgggaacatctatcttccaatgccgaacagcacaactaactcccaaccgccaccgctggcccacccaccgatcgttgagccggatcaggatcctgcggccctcacgtgacccccagagaacatcgcctcctcataggccgtcgcgtgcgagggctgacgcccgtcaacacgacccccagggaagacgtcacgtcggcaattccggagattcaaggcgagcgcataggccgcgccaattaagctaaaacccgaagaaatccttcgagcagagcaacagctcggcggggccccactttttctaactttcccccgctccagtctataaatagcgcccactttccgcccaggtttcctcgccattgacgattagagcactcgacggaggtaaagctgcttccctgggtgccccccgcaccaccaccaacg

SEQ ID NO: 43 - DNA, 944 bp, Epipremnum Aureum
  promoter (1)..(944): Epipremnum aureum cathepsin B promoter (rrEaPetiole3)
ctgaggaaccccattgcagttttactacggtcagattggaggagagatcgaggcggcacacgtaacggcaaaacgtcacgttgacggggctcttatggttcccgtgttacgtaaacccccggcattgggaccattgggactcaccaagtcccgtgtgcgattgtctctcgagtggcgtgcctcatcactcaacacaagggcgaggggtgcacggcgctgtcgtcaccccttacgtgagcacgcggtataacgataacggcatctaccatccgacgggaaggaacagcgtcagatcgtagcgggatggaccgtcacggcctcctatatatctgatgaagcgccgtcagatcgggagccctgggcccacagcattggggtgcaaaccaatcaaatgccacttcctccaataatggacactatgggttccagcttcgaagaagcggcagctggcgcctccgtagctctctctctctctctctcaaacggcggcgtcatcttatcctatcgccttttcagagcccggctgcgcaagtaaccgtcccgttgatttagatctggatttcatttatttgctacgttgaaatcagggtccaatcgcactgccatcacccccaaacgtccggattccatttatgttatacgctgaatcgaggttcagccgcgttgccatcaccgtcgaaataggtaccgccgccgccaagcttccatatcatcttccccctcatatcaaattctgacccctctctctctcgccccccttccttcctggtcttgctactccgctccgtccctctccccgtttcacctctccacctgctgtctgtaaatggtgggggtgctgtttcgagctgaagggtgagggtgtgggggtgctgtttggagcggaacggagaggatagggcacagatatagctagggggagagagagagagagaacaacgggg

SEQ ID NO: 44 - DNA, 1055 bp, Epipremnum Aureum
  promoter (1)..(1055): Epipremnum aureum metallothionein-like protein type 2 promoter (rrEaPetiole4)
gtacgcaggctgaaagaagcctctttattcaattgagaagtgatagtaactattatccaatagagtagggagaagacgtatacatccttttctatggcatcgtttactttgtctgtccaccatgaatgtactctataataagtagtaatcaatgaaatgataccttaaaaaattagatgtttgtaatggcccccccttagtaatcttcctagtgacggatgcactttaaaatattggagaaaaaaatgatggttgcagtacaacaatatcatattaggtaagaaaaatacaagagtgtgtggagacttggtctacttttgatgtaaaaaaactgtaaatattgatgggttgagttagtattataaaaaaagaataagtttgagtaattccttttcacatagaaaccttttaagtccctttcatatatcaagcagcagacaagaatttaaaattttgaggtcttcacatgttggatgcagtgctcttctaattagctgtggcggcaggagttcatgaaaattaagaaaaaaatgatatgaaaaatgacaagattccctacttcatccgacaatgcatatggtctggggcaaattagaataccacacttctctcgtcattctgtcattactcctttttttattttaaaaaactcacctcatcatttatagtaccgcatgttaactcaggtgttatttgataacgttatcagcgttgattttatcttttaatttttataaaattttaaaaaatatataaatattactatcaaatgaataaatactaaatcagatttaaaaaataatttataattattagattaaaaatcactttaattcattttaataaaatctaagacaatcataatattgatatgatttaaaatttaataagaataacataacgataatattatcaaatgaagtgtttcaaagatcacaagttatcccatgttcgcaagaagggtaatataactgttgacggcacaactattgtaggagttttaaataaagatctatataacttgacatgacgtgaggtagcagagaccatcaaga

SEQ ID NO: 45 - DNA, 926 bp, Epipremnum Aureum
  promoter (1)..(926): Epipremnum aureum metallothionein promoter (rrEaStem1)
cccgatgagcacctcagatgtccatttgatgctctttcgtgaagtggattctctttgacgtacacatcttataaatatctatattcgtccacaccgctgtgcaacgattccctatgtgatatatgctgcacggacggagagggcggttgcctgaaggaacacatatgcttatgtggagcccagttctctttatacttttagttggctttgatttagttttttttttttttttttgaagtaggagcagatcctgtgttgttgcagatttactacctcggctgccacccatagaacaagatcatattaatctgtctcttggagctgaaatatggggagcaaagaaagggtattagaaagattcttaaaattagtagacctgtcctaagacactggtgattgagcagtggcatctgcacttgtggactgtgtgcttgtgcatggacgctggctggagagatccgccgacgtgcatggcgagggtgcatcaataggactggacaagggaagaagaaacatctgaactgagtatcatgtgaaattaaaactttttaataattttattttattttaaattaattttatgtggtccgaccacaaaaaaaacttacagaacattactgtggtgtgaagaagctccgtcgccatgctactggcgtgtggggtcggtaagattgtctctgcctcgacatgtgttcccccctacagaagaaaaagagaagaagtgacttgagtggtcgagacgcagccacccgtctcctccattatcgagagggattcctctggggaatcccactcgcaagagccccagcaatgcctataaataccggtggaggcggcccctctccagctcacacagagccgacgtgataagctcctcctctcgcttcagcagttctctcttgccttcgccacttcccattatcgcc

SEQ ID NO: 46 - DNA, 1045 bp, Epipremnum Aureum
  promoter (1)..(1045): Epipremnum aureum dormancy-associated protein 1 promoter (rrEaStem2)
tgtgagtgaccaagtgtgcttaagagcaaccaaagactttggtgagcatcatagtgcattatgttacccatcaaatatcatattgctcatcaaaagttactctgtggatagcacaacctaccatgttactcatatagaggtgtctagtgaataacaggatgttttgatggataacataatacatcatactacttactaatacatttagttgttcacaaagtatcacattatttattcatcaacacattaagttacttatgggcatataaaattacttaaagtatcccaattactgaggaaagatttagatgtataatatttttaacttatttctagtacaaatggggtgcacaaatagtgaacagagtgaggtcattttctgacaattccattgggtaatttttttttactctcttttttctttcaaactgattcaaagagtttaatggtgacagagtcacatatctagaagaatattattgggggcgggtgcaatgttgtttgcactacaagtcgacgaccggtcgtcacgtggatcccatagtgggccaggtccatgctatgataaagcccatcaaagggcagatatttccgtcgtcacgtgatggagggggggcccaaatcgtcttcatgcttatccgctacctgtccataccgccatcacgtcactctcccacagctttgatcacttccgccccctcccgcccagctaccctcgagacccggtattcggacgtcttctcggatccgaaatatccgctgttatctcgggttttcttgttggagtctcatcctccccttcacttgagacgatccggactcgatcagagtgttaaaggatggggatggagacgtgtgagtgagggcaaaaggaaacctacgtacaggttgtctgaaggaaactttttccagcactatcctgctctcgttacctgtgactatccgttaatttggcatctgagcagaatctctttctatatatggagttggcgagggcagcagcaataggggtgcagagccagtgtagttgtggttgagaaggaag

SEQ ID NO: 47 - DNA, 1078 bp, Epipremnum Aureum
  promoter (1)..(1078): Epipremnum aureum dehydrin COR410-like promoter (rrEaStem3)
ctgaggacgcttcgagatccactgaccatgccactttttttttacgtgaacgaggcaagtcggcattgacgagcggggatgaaaagggccgtggagcgaaggggacacgcacgctcataatactgttctgtacggcttatatagtataaacagatccagcgcagcgcccgcgcatgtggcggggtattgggggaggcgatggcgcgcgtctgctcccccgccgtgaggccaaggacctccggtaggggcgcaccgctcgcggtgtatggcggccgtaccgtggacatgcatgtatggtgggctttttttaagtttgccccggataagtgttactgttgtggacatgcacatgcatacgatgatggggtccgtctgggtccgttgctctactcatccgatgccacgcaagctctgtagtaaatgtatgtatatattcgtgtgagaaagaggaacgaaaagggacaactaagcgaagtccgatggctcatcttaatgattaaattacaaaaaaaaattatttagatatcttcgtatcaagtctctagagaataatctgtcatttaaagtttgaggttattttatggatatttctttctcctttaatgacttataaatattagattttacttctctcagttataaaatcactcatcattccaactgagttatttatctaagatttgatgacaaggggaagacgattacgatgggcgctctccaagcgttgctgtggaatttctcgcggtgagtggcgatgacacgtgaaactttgtcacaactactccaagaatcccactagccattagcttgtatgatattaatactgagactggttattaacaaacatctaacaccaccttttatttaccagacgaggacggtaacggaaaacaggggaatgaaagcaagagaaagccgacatcggaccgacgttcctcgaggcccgatctgatccactccaacccgccatcgtcagcatcaccgtctcaaatcaagtccatttatcgcccgctgcgaaagggaaaggcaaagggtttgaaaaaaaaaaagaaaggcaacgaaagggggacgaaggtgg

SEQ ID NO: 48 - DNA, 899 bp, Epipremnum Aureum
  promoter (1)..(899): Epipremnum aureum ubiquitin-conjugating enzyme E2 8 promoter (rrEaStem4)
acatgacactaggcaggatcattcaatacaactaacttgaaagataatgaaagaaaataacaataagtgattacagtgttagcattaattattttttattatcttcatcttttgtcccactagtattaaatacttaaaaaatgtttaaattatatgcgatcactaagatgagggggagaggggggtatgagtaactaaaaacatctttatattataaaaagtagtgcaataaatatcactctatttatatgtaagggcaaatgtacaaataagagagattctaggggctgcctccacaaaagtcccttaaacttgaagatcccttctaagttttaagatttaacattctttttgttgaactaacgcaattccactgaggtttaattcagattttacttaactaaattaaatatttaaaaaatattatattttaaatttataaaaatatataaattattttaaatattatattattttttaaattatttataataatttagataatcctcaacaaaccatggttagaagttcgaagttcaaacctgtgccctaccgttaccaccgtgtggttgcctgcgacctgttcgaaccggattcctctttatatatcctttaaatatattagcgccgctcctctctctctctctgtctctctcgccgacggcagcctctgtccccttctacgggtcctcgaggaggggcggggcgggcggagggggtcggtcgcacgcagcaggcagaagagagaagcattccaccgcgctctcttccgcgtccgttccctccctctccgcctccgtttgttccctgctttcctctcaaccctgacggtttcctctcttctttcccctctctatctagggtttcggagagattggcacgtaccgaccggggtttcc

SEQ ID NO: 49 - DNA, 209 bp, Cauliflower mosaic virus
  terminator (1)..(209): Cauliflower Mosaic virus 35S terminator (TerCaMV35S)
agcttctctagctagagtcgatcgacaagctcgagtttctccataataatgtgtgagtagttcccagataagggaattagggttcctatagggtttcgctcatgtgttgagcatataagaaacccttagtatgtatttgtatttgtaaaatacttctatcaataaaatttctaattcctaaaaccaaaatccagtactaaaatccagat

SEQ ID NO: 50 - DNA, 490 bp, Arabidopsis thaliana
  terminator (1)..(490): Arabidopsis thaliana Actin 2 terminator (TerAthAct2)
agcttgctctcaagatcaaaggcttaaaaagctggggttttatgaatgggatcaaagtttctttttttcttttatatttgcttctccatttgtttgtttcatttccctttttgttttcgtttctatgatgcacttgtgtgtgacaaactctctgggtttttacttacgtctgcgtttcaaaaaaaaaaaccgctttcgttttgcgttttagtcccattgttttgtagctctgagtgatcgaattgatgcctctttattccttttgttccctataatttctttcaaaactcagaagaaaaaccttgaaactctttgcaatgttaatataagtattgtataagatttttattgatttggttattagtcttacttttgctacctccatcttcacttggaactgatattctgaatagttaaagcgttacatgtgttccattcacaaatgaacttaaactagcacaaagtcagatattttaagatcgcaccattt

SEQ ID NO: 51 - DNA, 281 bp, Solanum lycopersicum
  terminator (1)..(281): Solanum lycopersicum Histone H4 terminator (TerSlHisH4)
agcttttatgttggtgatatggtggtaaatgtagggatttagtttacaattgcgtatgtctgtgttggatatctgtagtgctgttcttatggcttagatcttgtaatttctcattacagtatcaatgaatagatatcagtttctagtgatgacattggttcgtcttttagctgttgattaatttttcttaattgattcatcctattgcaattcttctgaatttaaattgtatactgtgaaattaagaaaattcttgaaattaatgagaatttgagtaatag

SEQ ID NO: 52 - DNA, 209 bp, Agrobacterium tumefaciens; identical to SEQ ID NO: 49
  terminator (1)..(209): Agrobacterium tumefaciens nopaline synthase terminator (TerNos)

SEQ ID NO: 53 - DNA, 735 bp, Agrobacterium tumefaciens
  terminator (1)..(735): Agrobacterium tumefaciens octopine synthase terminator (TerOcs)
agcttgtcctgctttaatgagatatgcgagaagcctatgatcgcatgatatttgctttcaattctgttgtgcacgttgtaaaaaacctgagcatgtgtagctcagatccttaccgccggtttcggttcattctaatgaatatatcacccgttactatcgtatttttatgaataatattctccgttcaatttactgattgtaccctactacttatatgtacaatattaaaatgaaaacaatatattgtgctgaataggtttatagcgacatctatgatagagcgccacaataacaaacaattgcgttttattattacaaatccaattttaaaaaaagcggcagaaccggtcaaacctaaaagactgattacataaatcttattcaaatttcaaaagtgccccaggggctagtatctacgacacaccgagcggcgaactaataacgctcactgaagggaactccggttccccgccggcgcgcatgggtgagattccttgaagttgagtattggccgtccgctctaccgaaagttacgggcaccattcaacccggtccagcacggcggccgggtaaccgacttgctgccccgagaattatgcagcatttttttggtgtatgtgggccccaaatgaagtgcaggtcaaaccttgacagtgacgacaaatcgttgggcgggtccagggcgaattttgcgacaacatgtcgaggctcagcaggaccgcttgagaccacgaa

SEQ ID NO: 54 - DNA, 255 bp, Agrobacterium tumefaciens
  terminator (1)..(255): Agrobacterium tumefaciens mannopine synthase terminator (TerMas)
agcttggactcccatgttggcaaaggcaaccaaacaaacaatgaatgatccgctcctgcatatggggcggtttgagtatttcaactgccatttgggctgaattgtagacatgctcctgtcagaaattccgtgatcttactcaatattcagtaatctcggccaatatcctaaatgtgcgtggctttatctgtctttgtattgtttcatcaattcatgtaacgtttgcttttcttatgaattttcaaataaattatc

SEQ ID NO: 55 - DNA, 255 bp, Agrobacterium tumefaciens; identical to SEQ ID NO: 54
  terminator (1)..(255): Agrobacterium tumefaciens agropine synthase terminator (TerAgs)

SEQ ID NO: 56 - DNA, 284 bp, Arabidopsis thaliana
  misc_feature (1)..(284): Arabidopsis thaliana DEMI intronic nucleotide sequence
gtaagcagaactctagttgcagtgtatattcttgctgagaaagtgacattcttgaaattttcatgttttgctcatagcataagtgcatataatattgaagtcttaagaatttttgtggaaattgaattatagtgttcctcagttgccttgtgtttcaaccttgatttttgatagaggaacttttactactgttgaatcattcatcaattgaaataactttttactaatagttgattcctgactctttttgtctatcttttcttgttgaaaatgtcgatatatag

SEQ ID NO: 57 - DNA, 67 bp, Tobacco mosaic virus
  misc_feature (1)..(67): Tobacco Mosaic Virus (TMV) 5'-leader sequence (Omega)
gtatttttacaacaattaccaacaacaacaaacaacaaacaacattacaattactatttacaattac

SEQ ID NO: 58 - DNA, 58 bp, Arabidopsis thaliana
  misc_feature (1)..(58): Arabidopsis thaliana Alcohol Dehydrogenase 5' UTR
tacatcacaatcacacaaaactaacaaaagatcaaaagcaagttcttcactgttgata

SEQ ID NO: 59 - DNA, 92 bp, Nicotiana tabacum
  misc_feature (1)..(92): Nicotiana tabacum Alcohol Dehydrogenase 5' UTR
gtctatttctcagtattcagaaacaacaaaagttcttctctacataaaattttcctattttagtgatcagtgaaggaaatcaagaaaaataa

SEQ ID NO: 60 - DNA, 101 bp, Oryza sativa
  misc_feature (1)..(101): Oryza sativa Alcohol Dehydrogense 5' UTR
gaattccaagcaacgaactgcgagtgattcaagaaaaaagaaaacctgagctttcgatctctacggagtggtttcttgttctttgaaaaagagggggatta

SEQ ID NO: 61 - protein, 54 aa, Artificial Sequence
  Chloroplast localization signal amino acid sequence
ASSMLSSAAVVTSPAQATMVAPFTGLKSSASFPVTRKANNDITSITSNGGRVSC

SEQ ID NO: 62 - protein, 51 aa, Artificial Sequence
  Mitochondria localization signal amino acid sequence
MAMAVFRREGRRLLPSIAARPIAAIRSPLSSDQEEGLLGVRSISTQVVRNR

SEQ ID NO: 63 - protein, 49 aa, Artificial Sequence
  Peroxisome localization signal amino acid sequence
MEKAIERQRVLLEHLRPSSSSSHNYEASLSASACLAGDSAAYQRTSLYG

SEQ ID NO: 64 - DNA, 63 bp, Artificial Sequence
  Cleavage signal nucleotide sequence
ggctctggcgaaggcagaggcagcctgcttacatgtggcgacgtggaagagaaccccggacct

SEQ ID NO: 65 - protein, 21 aa, Artificial Sequence
  Cleavage signal amino acid sequence
GSGEGRGSLLTCGDVEENPGP

SEQ ID NO: 66 - DNA, 72 bp, Artificial Sequence
  Exemplary Cleavage signal nucleotide sequence
gccccggtgaagcagaccctgaacttcgacctgctgaagctggcgggcgacgtggagagcaacccgggcccc

SEQ ID NO: 67 - protein, 24 aa, Artificial Sequence
  Cleavage signal amino acid sequence
APVKQTLNFDLLKLAGDVESNPGP

SEQ ID NO: 68 - DNA, 675 bp, Artificial Sequence
  IntF2A nucleotide sequence
tgtctatcctttggaacagagatattgacagtggaatatggcccgttaccaataggcaaaatcgtgtcagaagagatcaattgctcagtctattctgttgatcctgagggtagagtttatacacaagccattgcgcaatggcatgatagaggcgaacaagaagtcttggaatatgaattagaggacgggagcgtcattagggcaacaagtgatcataggtttcttactacagattatcaacttctcgccattgaggaaatttttgcccgacagctagatctcctgacactcgaaaatattaaacaaaccgaggaagcgttggataatcatcgcctcccgtttcctctcctagatgcagggacaattaagatggttaaagtgattgggaggagatcacttggtgtgcaaaggatttttgatatagggctccctcaggaccacaacttcttactggctaacggggcaatcgcggcagcttgttcatgtggtagtgggtcacgggtaactgagttactttataggatgaagcgagctgaaacctattgcccaagaccccttttggcgattcatcctacagaagcacgccacaaacaaaaaattgtggccccagttaaacaacttctcaattttgaccttttgaagttggccggtgacgtcgaatctaaccccggccct

SEQ ID NO: 69 - protein, 225 aa, Artificial Sequence
  IntF2A amino acid sequence
CLSFGTEILTVEYGPLPIGKIVSEEINCSVYSVDPEGRVYTQAIAQWHDRGEQEVLEYELEDGSVIRATSDHRFLTTDYQLLAIEEIFARQLDLLTLENIKQTEEALDNHRLPFPLLDAGTIKMVKVIGRRSLGVQRIFDIGLPQDHNFLLANGAIAAACSCGSGSRVTELLYRMKRAETYCPRPLLAIHPTEARHKQKIVAPVKQLLNFDLLKLAGDVESNPGP

SEQ ID NO: 70 - DNA, 717 bp, Artificial Sequence
  eGFP reporter nucleotide sequence
atggtgagcaagggcgaggagctgttcaccggggtggtgcccatcctggtcgagctggacggcgacgtaaacggccacaagttcagcgtgtccggcgagggcgagggcgatgccacctacggcaagctgaccctgaagttcatctgcaccaccggcaagctgcccgtgccctggcccaccctcgtgaccaccctgacctacggcgtgcagtgcttcagccgctaccccgaccacatgaagcagcacgacttcttcaagtccgccatgcccgaaggctacgtccaggagcgcaccatcttcttcaaggacgacggcaactacaagacccgcgccgaggtgaagttcgagggcgacaccctggtgaaccgcatcgagctgaagggcatcgacttcaaggaggacggcaacatcctggggcacaagctggagtacaactacaacagccacaacgtctatatcatggccgacaagcagaagaacggcatcaaggtgaacttcaagatccgccacaacatcgaggacggcagcgtgcagctcgccgaccactaccagcagaacacccccatcggcgacggccccgtgctgctgcccgacaaccactacctgagcacccagtccgccctgagcaaagaccccaacgagaagcgcgatcacatggtcctgctggagttcgtgaccgccgccgggatcactctcggcatggacgagctgtacaag

SEQ ID NO: 71 - protein, 239 aa, Artificial Sequence
  eGFP reporter amino acid sequence
MVSKGEELFTGVVPILVELDGDVNGHKFSVSGEGEGDATYGKLTLKFICTTGKLPVPWPTLVTTLTYGVQCFSRYPDHMKQHDFFKSAMPEGYVQERTIFFKDDGNYKTRAEVKFEGDTLVNRIELKGIDFKEDGNILGHKLEYNYNSHNVYIMADKQKNGIKVNFKIRHNIEDGSVQLADHYQQNTPIGDGPVLLPDNHYLSTQSALSKDPNEKRDHMVLLEFVTAAGITLGMDELYK

SEQ ID NO: 72 - DNA, 711 bp, Artificial Sequence
  mCherry reporter nucleotide sequence
atggtgagcaagggcgaggaggataacatggccatcatcaaggagttcatgcgcttcaaggtgcacatggagggctccgtgaacggccacgagttcgagatcgagggcgagggcgagggccgcccctacgagggcacccagaccgccaagctgaaggtgaccaagggtggccccctgcccttcgcctgggacatcctgtcccctcagttcatgtacggctccaaggcctacgtgaagcaccccgccgacatccccgactacttgaagctgtccttccccgagggcttcaagtgggagcgcgtgatgaacttcgaggacggcggcgtggtgaccgtgacccaggactcctccctgcaggacggcgagttcatctacaaggtgaagctgcgcggcaccaacttcccctccgacggccccgtaatgcagaagaaaaccatgggctgggaggcctcctccgagcggatgtaccccgaggacggcgccctgaagggcgagatcaagcagaggctgaagctgaaggacggcggccactacgacgctgaggtcaagaccacctacaaggccaagaagcccgtgcagctgcccggcgcctacaacgtcaacatcaagttggacatcacctcccacaacgaggactacaccatcgtggaacagtacgaacgcgccgagggccgccactccaccggcggcatggacgagctgtacaagtaa

SEQ ID NO: 73 - protein, 236 aa, Artificial Sequence
  mCherry reporter amino acid sequence
MVSKGEEDNMAIIKEFMRFKVHMEGSVNGHEFEIEGEGEGRPYEGTQTAKLKVTKGGPLPFAWDILSPQFMYGSKAYVKHPADIPDYLKLSFPEGFKWERVMNFEDGGVVTVTQDSSLQDGEFIYKVKLRGTNFPSDGPVMQKKTMGWEASSERMYPEDGALKGEIKQRLKLKDGGHYDAEVKTTYKAKKPVQLPGAYNVNIKLDITSHNEDYTIVEQYERAEGRHSTGGMDELYK

SEQ ID NO: 74 - DNA, 714 bp, Artificial Sequence
  mRuby reporter nucleotide sequence
atggtgtcaaaaggtgaggagctaatcaaagagaacatgcgaatgaaagtggtcatggaagggagcgtaaacggccaccagttcaaatgcacaggcgagggcgagggcaacccatacatgggtacgcagaccatgaggataaaagtaatcgagggtggtccgttgccattcgccttcgacatcctggcaacctcgttcatgtacgggagtcgaacattcatcaaatacccaaaaggtataccggacttcttcaaacagagtttcccggaaggtttcacctgggagcgggtcacaaggtacgaggacggtggtgtcgtgacagtaatgcaggacacatccttagaggacggttgcctggtctaccacgtccaggtgcgtggcgtcaacttcccctcaaacggcccagtaatgcagaagaaaaccaaaggttgggagccgaacacagagatgatgtacccggcggacggtggcctgcgtggttacacacacatggcattaaaagtggacggtggtggtcacctctcgtgctcgttcgtcacaacctaccgaagcaagaaaacggtcgggaacatcaaaatgccgggtatacacgcagtcgaccaccgtctcgagcgtttagaggagagcgacaacgagatgttcgtcgtgcagcgagagcacgcagtggccaaattcgcgggtctaggcggcgggatggacgagttatacaaatga

SEQ ID NO: 75 - protein, 237 aa, Artificial Sequence
  mRuby reporter amino acid sequence
MVSKGEELIKENMRMKVVMEGSVNGHQFKCTGEGEGNPYMGTQTMRIKVIEGGPLPFAFDILATSFMYGSRTFIKYPKGIPDFFKQSFPEGFTWERVTRYEDGGVVTVMQDTSLEDGCLVYHVQVRGVNFPSNGPVMQKKTKGWEPNTEMMYPADGGLRGYTHMALKVDGGGHLSCSFVTTYRSKKTVGNIKMPGIHAVDHRLERLEESDNEMFVVQREHAVAKFAGLGGGMDELYK

SEQ ID NO: 76 - DNA, 703 bp, Artificial Sequence
  RRvT reporter nucleotide sequence
vatggtatcaaaaggggaagaggtgatcaaagagttcatgcgtttcaaagtacgaatggaaggttccatgaacgggcacgagttcgagatagagggtgagggtgagggtaggccatacgagggcacacagacggccaaactgaaagtaaccaaaggtggcccactcccattcgcgtgggacatcttgagtccacagttcatgtacggtagcaaagcctacgtcaaacacccggccgacataccagactacaagaaactaagtttcccagaggggttcaaatgggagcgagtaatgaacttcgaggacggcggcctggtcacggtgacccaggactcgagtttacaggacggtaccttgatatacaacgtcaaaatgcggggtacaaactttcccccagacggccccgtaatgcagaagaaaacaatgggttgggaagcaagcacagagcgtttgtacccaagggacggtgtgctaaaaggtgagatccaccaggcactaaaattaaaagacggcggtcactacctagtcgagttcaaaaccatatacatggcgaagaaacccgtgcagctcccaggttactactacgtagacaccaaattagacatcacgtcgcacaacgaggactacacgatcgtcgagcagtacgagcgtagcgagggtcgacaccacctcttcctatacggtatggacgagctctacaaa

SEQ ID NO: 77 - protein, 234 aa, Artificial Sequence
  RRvT reporter amino acid sequence
MVSKGEEVIKEFMRFKVRMEGSMNGHEFEIEGEGEGRPYEGTQTAKLKVTKGGPLPFAWDILSPQFMYGSKAYVKHPADIPDYKKLSFPEGFKWERVMNFEDGGLVTVTQDSSLQDGTLIYNVKMRGTNFPPDGPVMQKKTMGWEASTERLYPRDGVLKGEIHQALKLKDGGHYLVEFKTIYMAKKPVQLPGYYYVDTKLDITSHNEDYTIVEQYERSEGRHHLFLYGMDELYK

SEQ ID NO: 78 - DNA, 711 bp, Artificial Sequence
  mTFP1 reporter nucleotide sequence
atggtcagtaaaggtgaggagacgacgatgggtgtcataaaaccagacatgaaaataaaactgaaaatggaaggtaacgtcaacggccacgcattcgtaatcgagggtgagggtgaggggaaaccatacgacgggacgaacaccataaacctggaagtgaaagagggtgccccactaccattctcatacgacatcctgacaaccgcgttcgcctacggtaacagggcattcaccaaataccccgacgacatcccaaactacttcaaacagtcattcccagagggttacagttgggagaggacaatgacattcgaggacaaagggatcgtgaaagtgaaaagcgacatcagcatggaagaggactccttcatctacgagatccacttgaaaggtgagaacttcccacccaacggtcccgtaatgcagaagaaaacaaccggttgggacgcatcaaccgagcggatgtacgtaagggacggcgtcttaaaaggtgacgtgaaacacaaactgctgttggaaggtggtgggcaccacagggtcgacttcaaaaccatataccgagcaaagaaagccgtgaaattgccagactaccacttcgtcgaccaccggatagagatactaaaccacgacaaagactacaacaaagtaaccgtgtacgagagtgccgtagcgcgaaactccacagacggcatggacgagctgtacaaatga

SEQ ID NO: 79 - protein, 236 aa, Artificial Sequence
  mTFP1 reporter amino acid sequence
MVSKGEETTMGVIKPDMKIKLKMEGNVNGHAFVIEGEGEGKPYDGTNTINLEVKEGAPLPFSYDILTTAFAYGNRAFTKYPDDIPNYFKQSFPEGYSWERTMTFEDKGIVKVKSDISMEEDSFIYEIHLKGENFPPNGPVMQKKTTGWDASTERMYVRDGVLKGDVKHKLLLEGGGHHRVDFKTIYRAKKAVKLPDYHFVDHRIEILNHDKDYNKVTVYESAVARNSTDGMDELYK

SEQ ID NO: 80 - DNA, 696 bp, Artificial Sequence
  RFP611 reporter nucleotide sequence
atgaactcattaatcaaagagaacatgcgtatgatggtggtcatggaaggctcggtcaacggttaccagttcaaatgcacaggtgagggtgacggtaacccatacatgggtacccagacaatgcgtatcaaagtggtagagggcggtccattgcccttcgcgttcgacgtactggcaaccagtttcatgtacggttcaaagacgttcatcaaacacaccaaaggtatacccgacttcttcaaacagtcattcccagagggtttcacatgggagcgggtgacgaggtacgaggacggtggtgtcatcaccgtgatgcaggacacatcgctcgaggacggctgcttggtgtaccacgccaaagtgacgggcgtcaacttccccagtaacggtgcagtcatgcagaagaaaacgaaagggtgggagccaaacacggagatgttataccccgccgacggcggtctgcgaggttacagtcagatggccctgaacgtggacggggggggttacttgtcgtgctccttcgagacaacgtacaggagtaagaaaacggtagagaacttcaaaatgccaggcttccacttcgtcgaccaccgtttggagcgtctcgaggagagtgacaaagagatgttcgtggtccagcacgagcacgccgtggcaaaattctgcgatctcccatcaaaactcggtaggctgtag

SEQ ID NO: 81 - protein, 231 aa, Artificial Sequence
  RFP611 reporter amino acid sequence
MNSLIKENMRMMVVMEGSVNGYQFKCTGEGDGNPYMGTQTMRIKVVEGGPLPFAFDVLATSFMYGSKTFIKHTKGIPDFFKQSFPEGFTWERVTRYEDGGVITVMQDTSLEDGCLVYHAKVTGVNFPSNGAVMQKKTKGWEPNTEMLYPADGGLRGYSQMALNVDGGGYLSCSFETTYRSKKTVENFKMPGFHFVDHRLERLEESDKEMFVVQHEHAVAKFCDLPSKLGRL

SEQ ID NO: 82 - DNA, 723 bp, Artificial Sequence
  dTFP0.2 reporter nucleotide sequence
atggtgtcgaaaggtgaggagacgactatgggcgtgatcaaaccagacatgaaaatcaaactgaaaatggaaggtaacgtcaacggtcacgcattcgtaatcgagggtgaaggggaaggcaaaccatacgacggtacaaacacagtcaacttggaagtcaaagagggcgcaccactgccgttcagttacgacatcctcagtaacgcattccagtacggtaaccgtgcattcacaaaataccccgacgacatcgcaaactacttcaaacagtcattcccagagggttacagctgggagcggacaatgacattcgaggacaaagggatcgtaaaagtgaaaagtgacatatcaatggaagaggactcattcatctacgagataaggttaaaagggaagaacttcccaccaaacggtccagtgatgcagaagaaaacactcaaatgggagccatcaaccgagatcctctacgtgcgtgacggtgtcttggtgggtgacatctcacacagtttgctgctcgagggtggcggtcactaccggtgcgacttcaaaaccatctacaaagccaagaaagtagtcaaactgcccgactaccacttcgtcgaccacaggatagagatcttgaaccacgacaaagactacaacaaagtcacattgtacgagaacgcagtggcccgatacagcctgttaccaccacaggccgggatggacgagttgtacaaatga

SEQ ID NO: 83 - protein, 240 aa, Artificial Sequence
  dTFP0.2 reporter amino acid sequenc
MVSKGEETTMGVIKPDMKIKLKMEGNVNGHAFVIEGEGEGKPYDGTNTVNLEVKEGAPLPFSYDILSNAFQYGNRAFTKYPDDIANYFKQSFPEGYSWERTMTFEDKGIVKVKSDISMEEDSFIYEIRLKGKNFPPNGPVMQKKTLKWEPSTEILYVRDGVLVGDISHSLLLEGGGHYRCDFKTIYKAKKVVKLPDYHFVDHRIEILNHDKDYNKVTLYENAVARYSLLPPQAGMDELYK

SEQ ID NO: 84 - DNA, 699 bp, Artificial Sequence
  meffCFP reporter nucleotide sequence
atggcattgagcaaacagtccctacccagcgacatgaaattgatctaccacatggacgggaacgtgaacggtcactccttcgtcataaaaggcgagggtgagggtaaaccatacgagggcacacacacaataaaactgcaggtagtcgagggtagtccgctgccgttcagcgccgacatactgtcaaccgtattccagtacggtaaccgatgcttcacaaaatacccaccaaacatagtggactacttcaagaactcatgctccggtggtggctacaaattcgggcgttcattcctatacgaggacggcgcggtctgcacagcaagtggtgacataacactcagtgcagacaagaaatcattcgagcacaaatcgaaattcctgggcgtgaacttcccagcagacggcccggtgatgaagaaagagacaacaaactgggagccatcatgcgagaaaatgacgcccaacggcatgacgttgatcggggacgtcacaggcttcttattaaaagaggacgggaaacggtacaaatgccagttccacaccttccacgacgccaaagacaaaagcaagaagatgccgatgccagacttccacttcgtgcagcacaaaatagagcggaaagacctgccaggttcaatgcagacatggcgactgacagagcacgcagccgcgtgcaaaacgtgcttcaccgagtga

SEQ ID NO: 85 - protein, 232 aa, Artificial Sequence
  meffCFP reporter amino acid sequence
MALSKQSLPSDMKLIYHMDGNVNGHSFVIKGEGEGKPYEGTHTIKLQVVEGSPLPFSADILSTVFQYGNRCFTKYPPNIVDYFKNSCSGGGYKFGRSFLYEDGAVCTASGDITLSADKKSFEHKSKFLGVNFPADGPVMKKETTNWEPSCEKMTPNGMTLIGDVTGFLLKEDGKRYKCQFHTFHDAKDKSKKMPMPDFHFVQHKIERKDLPGSMQTWRLTEHAAACKTCFTE

SEQ ID NO: 86 - DNA, 717 bp, Artificial Sequence
  Folding Reporter GFP reporter nucleotide sequence
atgagtaaaggtgaggaactgttcacaggcgttgtaccgatcctggtggagttagacggcgacgtgaacggtcacaaattctcagtcagtggtgagggtgagggcgacgccacatacggtaaattgacactgaaattcatatgcacaacaggtaaattgcccgtaccctggccaacgttggtaacaaccctaacgtacggtgtccagtgcttctcgcgatacccagaccacatgaaacgtcacgacttcttcaaaagcgcgatgccagagggttacgtccaggagcgaacaatatcattcaaagacgacggtaactacaaaacaagggcagaggtgaaattcgagggtgacacattagtcaaccgaatagagttaaaaggtatcgacttcaaagaggacggtaacatactaggtcacaaactcgagtacaactacaactcccacaacgtctacataacagcggacaaacagaagaacggtatcaaagcaaacttcaaaatcaggcacaacatcgaggacggctcagtgcagctcgcggaccactaccagcagaacacacccatcggtgacggtccggtcttactccccgacaaccactacctatcaacgcagtccgccctgagtaaagacccaaacgagaaacgtgaccacatggtcctactcgagttcgtaacagcagcggggataacccacggtatggacgagttatacaaatga

SEQ ID NO: 87 - protein, 238 aa, Artificial Sequence
  Folding Reporter GFP reporter amino acid sequence
MSKGEELFTGVVPILVELDGDVNGHKFSVSGEGEGDATYGKLTLKFICTTGKLPVPWPTLVTTLTYGVQCFSRYPDHMKRHDFFKSAMPEGYVQERTISFKDDGNYKTRAEVKFEGDTLVNRIELKGIDFKEDGNILGHKLEYNYNSHNVYITADKQKNGIKANFKIRHNIEDGSVQLADHYQQNTPIGDGPVLLPDNHYLSTQSALSKDPNEKRDHMVLLEFVTAAGITHGMDELYK

SEQ ID NO: 88 - DNA, 681 bp, Artificial Sequence
  ccalOFP1 reporter nucleotide sequence
atgtccctctcgaaacaagtattaccaagagacgttaaaatgcgattccacatggacggttgcgtgaacggccactcattcacgatagaaggagagggtaccgggaaaccgtacgagggtaagaaaacgttgaaactcagggtgacaaaaggtggtccgctaccgttcgccttcgacatcctgtcggcgaccttcacgtacggcaacaggtgcttctgcgactacccagaggagatgcccgactacttcaaacagagtttaccagagggttacagctgggagaggacgatgatgtacgaggacggtgcatgctcaacagcgagtgcccacatcagtttggacaaagactgcttcatccacaacagtacattccacggtgtgaacttcccagcgaacggcccagtcatgcagaagaaggcgatgaactgggagccgagctcagagttaataaccccatgcgacgggatcttgaaaggcgacgtaacgatgttcttactacaagagggtggtcaccgtcacaaatgccagttcacaacttcctacaaagcccacaaagcggtcaaaatcccgccaaaccacatcatcgagcacaggttggtacgtaaagaggtgggtgacgcagtccagatccaggagcacgcagtggcgaaacacttcacagtccagataaaagaggcgtga

SEQ ID NO: 89 - protein, 226 aa, Artificial Sequence
  ccalOFP1 reporter amino acid sequence
MSLSKQVLPRDVKMRFHMDGCVNGHSFTIEGEGTGKPYEGKKTLKLRVTKGGPLPFAFDILSATFTYGNRCFCDYPEEMPDYFKQSLPEGYSWERTMMYEDGACSTASAHISLDKDCFIHNSTFHGVNFPANGPVMQKKAMNWEPSSELITPCDGILKGDVTMFLLQEGGHRHKCQFTTSYKAHKAVKIPPNHIIEHRLVRKEVGDAVQIQEHAVAKHFTVQIKEA

SEQ ID NO: 90 - DNA, 696 bp, Artificial Sequence
  tdKatushka2 reporter nucleotide sequence
atgtcagagttgataaaagagaacatgcacatgaaattatacatggaaggtaccgtaaacaaccaccacttcaaatgcacctcagagggagagggtaaaccgtacgagggtacacagacaatgaaaatcaaagtggtcgagggtggtcccctaccattcgcgttcgacatcctggccaccagtttcatgtacggctcaaagacgttcataaaccacacacaggggatacccgacttcttcaaacagtcattcccagagggcttcacctgggagcgaatcacaacatacgaggacggcggtgtgttgacagcaacgcaggacacatccctgcagaacggttgcataatatacaacgttaaaataaacggtgtcaacttcccatcgaacgggagtgtgatgcagaagaaaaccttaggttgggaagccaacaccgagatgttgtaccccgccgacggcggcctacggggacacagtcagatggccttaaaactagtgggtggtggttacctacactgcagtttcaaaacaacctaccgtagcaagaaaccagcgaagaacctcaaaatgccaggtttccacttcgtggaccaccgtctcgagaggatcaaagaggcggacaaagagacatacgtggagcagcacgagatggcggtcgcgaaatactgcgacctaccatccaaactaggtcaccgttag

SEQ ID NO: 91 - protein, 231 aa, Artificial Sequence
  tdKatushka2 reporter amino acid sequence
MSELIKENMHMKLYMEGTVNNHHFKCTSEGEGKPYEGTQTMKIKVVEGGPLPFAFDILATSFMYGSKTFINHTQGIPDFFKQSFPEGFTWERITTYEDGGVLTATQDTSLQNGCIIYNVKINGVNFPSNGSVMQKKTLGWEANTEMLYPADGGLRGHSQMALKLVGGGYLHCSFKTTYRSKKPAKNLKMPGFHFVDHRLERIKEADKETYVEQHEMAVAKYCDLPSKLGHR

SEQ ID NO: 92 - DNA, 1035 bp, Artificial Sequence
  vsfGFP-0 reporter nucleotide sequence
atgtctaaaggagaggagttgttcactggtgtcgtgccgatcctggtcgagctcgacggtgacgtcaacgggcacaaattctcagtccgaggtgagggcgagggtgacgcaacaaacggtaaattgacactgaaattcatctgcacgacgggtaaattaccggtaccgtggccaacattggtgacgacactgacatacggtgtgcagtgcttcagccgataccccgaccacatgaaacgacacgacttcttcaaatcagcaatgccagagggttacgtacaggagaggacgatcagcttcaaagacgacggcacctacaaaacccgtgcggaagtgaaattcgagggtgacaccttggtcaaccgaatcgagttgaaaggtatcgacttcaaagaggacggtaacatattaggtcacaaattggagtacaacttcaacagtcacaacgtctacatcacagccgacaaacagaagaacggtatcaaagccaacttcaaaatccgtcacaacgtagaggacggctccgtgcagctagcggaccactaccagcagaacacgccaatcggggacggccccgtactgctgccagacaaccactacctatcaacacagagcgtgctctcaaaagacccaaacgagaaacgggaccacatggtgttgttggagttcgtaacggcggcaggtatagcgcaggtgcagttggtagagtcaggtggggcattggtacagccaggtggttcactgcggttatcatgcgcagcatcaggtttcccggtaaacaggtactccatgcgatggtaccggcaggcaccgggtaaagagagggagtgggtggcgggtatgtccagtgcgggtgacaggtcgtcgtacgaggactcagtcaaaggtaggttcaccataagtagggacgacgcacgaaacaccgtgtacctgcagatgaacagtctaaaaccagaggacacagcggtgtactactgcaacgtcaacgtaggtttcgagtactggggtcagggtacgcaggtgacagtgtcgtga

SEQ ID NO: 93 - protein, 344 aa, Artificial Sequence
  vsfGFP-0 reporter amino acid sequence
MSKGEELFTGVVPILVELDGDVNGHKFSVRGEGEGDATNGKLTLKFICTTGKLPVPWPTLVTTLTYGVQCFSRYPDHMKRHDFFKSAMPEGYVQERTISFKDDGTYKTRAEVKFEGDTLVNRIELKGIDFKEDGNILGHKLEYNFNSHNVYITADKQKNGIKANFKIRHNVEDGSVQLADHYQQNTPIGDGPVLLPDNHYLSTQSVLSKDPNEKRDHMVLLEFVTAAGIAQVQLVESGGALVQPGGSLRLSCAASGFPVNRYSMRWYRQAPGKEREWVAGMSSAGDRSSYEDSVKGRFTISRDDARNTVYLQMNSLKPEDTAVYYCNVNVGFEYWGQGTQVTVS

SEQ ID NO: 94 - DNA, 660 bp, Artificial Sequence
  eYGFPuv reporter nucleotide sequence
atgaccacattcaaaatcgagagtaggatccacggtaacttgaacggcgagaaattcgagctagtaggcggtggtgtaggggaagagggaaggctcgagatcgagatgaaaacaaaagacaaaccgttagcattctcgccattcctgttgacaacgtgcatgggttacggtttctaccacttcgcttccttcccgaaaggtataaagaacatatacttgcacgcagccacgaacggcggctacaccaacacacgtaaagagatatacgaggacggtggtatactggaagtcaacttcaggtacacgtacgagttcaacaaaatcatcggcgacgtggagtgcataggtcacggcttcccctcgcagtccccaatcttcaaagacacaatagtcaaatcgtgcccaacggtggacttaatgctgccaatgagcgggaacataatcgcctcatcctacgcatacgcattccagctcaaagacggtagtttctacacagccgaggtcaagaacaacatagacttcaagaacccaatacacgagtccttctcaaaatccgggccgatgttcacacaccgtcgggttgaggagacactaacaaaagagaacctggcaatagtggagtaccagcaggtgttcaactcggccccgcgggacatgtga

SEQ ID NO: 95 - protein, 219 aa, Artificial Sequence
  eYGFPuv reporter amino acid sequence
MTTFKIESRIHGNLNGEKFELVGGGVGEEGRLEIEMKTKDKPLAFSPFLLTTCMGYGFYHFASFPKGIKNIYLHAATNGGYTNTRKEIYEDGGILEVNFRYTYEFNKIIGDVECIGHGFPSQSPIFKDTIVKSCPTVDLMLPMSGNIIASSYAYAFQLKDGSFYTAEVKNNIDFKNPIHESFSKSGPMFTHRRVEETLTKENLAIVEYQQVFNSAPRDM

SEQ ID NO: 96 - DNA, 2734 bp, Epipremnum Aureum
ctgtgacaacaaaatgggttccctggggtctgacaaggacaagaaggacttgattgtcactcaagttggtgttggtggttttggtgacaaggtttcagcaaaagagctaactgactttctggaatctaaagtggggctaatatggagatgtagactgaagacttcttggaccccaccagaatcctacccggactttcaagttgccattacatctgagaccctaaggacaggtaaatatgaaaaagtggtgcctcatgcatttgtacacttcgcagtttctgatggggccaagagggctgtcaatgctgctggcaaatctgagctcatgttgaatggctgctgcctcaaggtaaactcagggatggacagtgctttccgggtaaatcggaggagaactacagatccatttaagttttctgatgtccatgttgagataggaactctatgcagtcgggatgaattctgggttggttgggaaggacctaactctggtgttgattttgtaattgatccttttgatggttgttgtaaaatacttttctcaagggaggtggtgttctcatttaaaggaaggaaagagacggccgtgctcaaatgtgatgtcaagattgaattctttgtgagagagatcaatgaaataagattgtatactgacacgtcaccatttgtggtactattacatcttgcctcctctcctttagtctattatagaacagcagatgatgatatatatgtctctgtaccattcaatttactagatgatgaagacccatggataagaacaactgacttcacccccggtggagccattggcaggtgtagttcttataggatttctctctccccccgctattgggctaagttgaagaaagccatgaactacatgagggaacgcaggatcattgaacagcagcctaagcatgacctcttagtcctaaaagagccttcctatggatcaccaactttagatgtgtttttctgcattgaacatgccggtatcagtttcaatattatgtttttggtgaatgttttggtgcataaaggtattttcaatcaacatcagttgtctgatgatttctttgcattgctgacaagacagaatggcattgtaaatgaggcatcactgcggcatatctgttcatataagcggcccatatttgatgctacacgaaggctaaagcttgtacagcaatggtttctgaagaatcctaaactactgaaaacgagtaagacttctgcagataatgctgaagtaaggaggttgattataacgcctacaaaggcatattgtctccctcccgagatcgaactctccaatagagttcttagaaaatacaaggaggttgctgacaggttcttgagagttactttcatggatgaagggatgcagcagttgaataacaatgttctgacgtactattctgcacctattgttagggacataactaagaactcatactctcagaagacaactgtgtttaaaagggtgaagagtattttaactaatggttttcacttatgtggtcggaaatactcctttcttgctttctcatctaatcaattgagggacaggtctgcatggttctttgcacaggacaaggatcataatgtcaactccatcagaatttggatgggtaagttttcaaataggaacatcgcaaaatgtgctgctcggatgggtcagtgtttttcatctacatatgccacagtgaacgttccatcagaagaggttgatcctgaatttcaagatattgagagaaataactatgttttctctgatggtattggaaaactgacgcctgatcttgctacagaagttgctgaaaaattgcaactggctgataatccgccttctgcctatcaaattaggtatgctggttgcaagggtgttatagctgtatggcctggaaatggcaatggaatccgactcttcctgaggccaagcatgaataaatttgaatcacttcacactgtacttgaggttgtgtcatggacccgattccaaccaggcttcctgaaccgtcagattgtaaccttgctttcatccttgggtgttgcagattctgtgtttgatatgatgcaggatttgatgatttgtaagctagaccagatgcttgtggacactgatgtggcatttgatgttcttactacatcatgtgctgaacatgggaatattgcagcattaatgcttagtgctggttttagacctaagactgagccacatctcaaaggaatgctctcttgcataaggtctgcccaacttggagaccttttgagaaaggcaaggatcttcatccccaagggacgttggctgatgggttgcttggatgaactaggtgtacttgagcatgggcaatgctttatccaggtatcaactccatcattggaaaattacttctcaaaacatggttccgggttttctgaaactaagaaagtcagacaaacaatcaccgggactgttgcaattgcaaagaacccttgtcttcatcccggagatatcagaatactagaagcagttgatgtgcctggcctgcatcatcttgttgattgtttagtttttcctcaaaagggtgataggcctcatacaaatgaggcatcgggaagtgacctggatggggatctgtattttgttacctgggatgagaatctcttacccccaggtaagaagagctggccaccaatggattatgcagctccagaagtcaagcaattgcctcgcccagttactcacaca

SEQ ID NO: 97 - protein, 1215 aa, Epipremnum Aureum
MCWWTMGTNQWQQLWACKQQIEASLDADQARVASGQPRTVMTVFRKLLYCDNKMGSLGSDKDKKDLIVTQVGVGGFGDKVSAKELTDFLESKVGLIWRCRLKTSWTPPESYPDFQVAITSETLRTGKYEKVVPHAFVHFAVSDGAKRAVNAAGKSELMLNGCCLKVNSGMDSAFRVNRRRTTDPFKFSDVHVEIGTLCSRDEFWVGWEGPNSGVDFVIDPFDGCCKILFSREVVFSFKGRKETAVLKCDVKIEFFVREINEIRLYTDTSPFVVLLHLASSPLVYYRTADDDIYVSVPFNLLDDEDPWIRTTDFTPGGAIGRCSSYRISLSPRYWAKLKKAMNYMRERRIIEQQPKHDLLVLKEPSYGSPTLDVFFCIEHAGISFNIMFLVNVLVHKGIFNQHQLSDDFFALLTRQNGIVNEASLRHICSYKRPIFDATRRLKLVQQWFLKNPKLLKTSKTSADNAEVRRLIITPTKAYCLPPEIELSNRVLRKYKEVADRFLRVTFMDEGMQQLNNNVLTYYSAPIVRDITKNSYSQKTTVFKRVKSILTNGFHLCGRKYSFLAFSSNQLRDRSAWFFAQDKDHNVNSIRIWMGKFSNRNIAKCAARMGQCFSSTYATVNVPSEEVDPEFQDIERNNYVFSDGIGKLTPDLATEVAEKLQLADNPPSAYQIRYAGCKGVIAVWPGNGNGIRLFLRPSMNKFESLHTVLEVVSWTRFQPGFLNRQIVTLLSSLGVADSVFDMMQDLMICKLDQMLVDTDVAFDVLTTSCAEHGNIAALMLSAGFRPKTEPHLKGMLSCIRSAQLGDLLRKARIFIPKGRWLMGCLDELGVLEHGQCFIQVSTPSLENYFSKHGSGFSETKKVRQTITGTVAIAKNPCLHPGDIRILEAVDVPGLHHLVDCLVFPQKGDRPHTNEASGSDLDGDLYFVTWDENLLPPGKKSWPPMDYAAPEVKQLPRPVTHTDIIDFFTKNMVNESLGVICNGHVVHADRSEQGAMDTKCLLLAELAALAVDFPKTGKIVSMPHDLKPKLYPDFMGKDDFLSYKSDKILGKLYRKIKDSSEEDGLTSDLSYKHEDIPYDIDLEIGGASHFLEDAWDRKCSYDTVLNALLGQYRVNSEGEVVTGHIWSMPKFNSHDERGKLYEQKASAWYQVTYHPQWVKKALDLREPDGDHIPPRLSFAWIPVDYLVRIKVRSRSDKGELDGNKPVDALAAYLRDRV

SEQ ID NO: 98 - DNA, 309 bp, Arabidopsis thaliana
atgaaacatgaaatgatgaacattaaaccaagatgcattacaatatttttcttattgttcgctctgttactgggaaactatgtcgtacaggcctccaggcctaggtccatagagaacacagtttctctgttgccacaagtccaccttttaaattcgcgaaggagacacatgatcgggagcactgcaccaacatgtacttataatgaatgtagaggttgtcgttacaaatgtagggcagaacaggtgcctgtagaagggaacgatcctattaacagtgcatatcattaccgctgcgtgtgtcacaggtga

SEQ ID NO: 99 - protein, 102 aa, Arabidopsis thaliana
MKHEMMNIKPRCITIFFLLFALLLGNYVVQASRPRSIENTVSLLPQVHLLNSRRRHMIGSTAPTCTYNECRGCRYKCRAEQVPVEGNDPINSAYHYRCVCHR

SEQ ID NO: 100 - protein, 123 aa, Oryza sativa
MANACPTSTTSSLPLFFLFCFLLFSHARCNQGHHGSISGTDYGEQYPHQTLPEEHIHLQENIKVLNKERLPKYARRMLIGSTAPICTYNECRGCRFKCTAEQVPVDANDPMNSAYHYKCVCHR

SEQ ID NO: 101 - protein, 46 aa, Epipremnum Aureum
MIGSTAPTCSYNECRGCRFRCRAEQVPVDANDPINSAYHYRCVCHR

SEQ ID NO: 102 - DNA, 285 bp, Arabidopsis thaliana
atgtttagaagcgacaaggccgagaagatggacaaacgacggcgcaggcaatcaaaagctaaggcatcctgttctgaggaagtaagttcaatagaatgggaagctgtgaaaatgagcgaagaggaagaggatttgatatcaagaatgtataaactcgtgggtgacagatgggagttaatagccgggagaattcctggtaggacacctgaagagatcgagagatattggttgatgaaacatggagtagttttcgcaaatcggaggcgagactttttcagaaagtga

SEQ ID NO: 103 - protein, 94 aa, Arabidopsis thaliana
MFRSDKAEKMDKRRRRQSKAKASCSEEVSSIEWEAVKMSEEEEDLISRMYKLVGDRWELIAGRIPGRTPEEIERYWLMKHGVVFANRRRDFFRK

SEQ ID NO: 104 - DNA, 2010 bp, Arabidopsis thaliana
atggagcaaggaggaggtggtggtggtaatgaagttgtggaggaagcttcacctattagttcaagacctcctgctaacaacttagaagagcttatgagattctcagccgccgcggatgacggtggattaggaggtggaggtggaggaggaggaggaggaagtgcttcttcttcatcgggaaatcgatggccgagagaagaaactttagctcttcttcggatccgatccgatatggattctacttttcgtgatgctactctcaaagctcctctttgggaacatgtttccaggaagctattggagttaggttacaaacgaagttcaaagaaatgcaaagagaaattcgaaaacgttcagaaatattacaaacgtactaaagaaactcgcggtggtcgtcatgatggtaaagcttacaagttcttctctcagcttgaagctctcaacactactcctccttcatcttccctcgacgttactcctctctccgtcgctaatcccattctcatgccttcttcttcttcttctccatttcccgtattctctcaaccgcaaccgcaaacgcaaacgcaaccgcctcaaacgcataatgtctcttttactcctactccaccacctcttccacttccttcaatgggtccgatatttaccggtgttactttctcgtctcatagctcatcgacggcttcaggaatggggtctgatgatgatgacgacgatatggacgttgatcaggctaacattgcgggttctagtagccgaaaacgcaaacgtggaaaccgcggtggaggcggtaaaatgatggaattgtttgaaggtttggtgagacaagtaatgcaaaagcaagcggctatgcaaaggagtttcttggaagctcttgagaagagagagcaagaacgtcttgatcgtgaagaagcttggaaacgtcaagaaatggctcggttagctcgagaacacgaggtcatgtctcaagaacgagccgcctctgcttctcgtgacgccgcaatcatttcattgattcagaaaattactggccataccattcagttacctccttctttgtcatctcaaccgcctccaccgtatcaaccgccacccgcggtcactaaacgtgtggcggaaccaccattatcaacagctcaatctcaatcacaacaaccaataatggcgattccacaacaacaaattcttcctcctcctcctccttctcatcctcacgctcatcaaccagaacagaaacaacaacaacaaccacaacaagagatggtcatgagctcggaacaatcatcattaccatcatcatcaagatggccaaaggcagagattctagcgcttataaacctgagaagtggaatggaaccaaggtaccaagataatgtacctaaaggacttctatgggaagagatctcaacttcaatgaagagaatgggatacaacagaaacgctaagagatgtaaagagaaatgggaaaacataaacaaatactacaagaaagttaaagaaagcaacaagaaacgtcctcaagatgctaagacttgtccttactttcaccgcctcgatcttctttaccgcaacaaagtactcggtagtggcggtggttctagcacttctggtctacctcaagaccaaaaacagagtccggtcactgcgatgaaaccgccacaagaaggacttgttaatgttcaacaaactcatgggtcagcttcaactgaggaagaagagcctatagaggaaagtccacaaggaacagaaaagccagaagaccttgtgatgagagagctgattcaacaacaacagcaactacaacaacaagaatcaatgataggtgagtatgaaaagattgaagagtctcacaattataataacatggaggaagaggaagatcaggaaatggatgaggaagaactagacgaggatgagaagtccgcggctttcgagattgcgtttcaaagccctgcaaacagaggaggcaatggccatacggaaccacctttcttgacaatggttcagtaa

SEQ ID NO: 105 - protein, 669 aa, Arabidopsis thaliana
MEQGGGGGGNEVVEEASPISSRPPANNLEELMRFSAAADDGGLGGGGGGGGGGSASSSSGNRWPREETLALLRIRSDMDSTFRDATLKAPLWEHVSRKLLELGYKRSSKKCKEKFENVQKYYKRTKETRGGRHDGKAYKFFSQLEALNTTPPSSSLDVTPLSVANPILMPSSSSSPFPVFSQPQPQTQTQPPQTHNVSFTPTPPPLPLPSMGPIFTGVTFSSHSSSTASGMGSDDDDDDMDVDQANIAGSSSRKRKRGNRGGGGKMMELFEGLVRQVMQKQAAMQRSFLEALEKREQERLDREEAWKRQEMARLAREHEVMSQERAASASRDAAIISLIQKITGHTIQLPPSLSSQPPPPYQPPPAVTKRVAEPPLSTAQSQSQQPIMAIPQQQILPPPPPSHPHAHQPEQKQQQQPQQEMVMSSEQSSLPSSSRWPKAEILALINLRSGMEPRYQDNVPKGLLWEEISTSMKRMGYNRNAKRCKEKWENINKYYKKVKESNKKRPQDAKTCPYFHRLDLLYRNKVLGSGGGSSTSGLPQDQKQSPVTAMKPPQEGLVNVQQTHGSASTEEEEPIEESPQGTEKPEDLVMRELIQQQQQLQQQESMIGEYEKIEESHNYNNMEEEEDQEMDEEELDEDEKSAAFEIAFQSPANRGGNGHTEPPFLTMVQ

SEQ ID NO: 106 - DNA, 1893 bp, Arabidopsis thaliana
atgagtttctgggacgttttcgattttgaaaatcccaagactctctttacttccaaaaaaaaaaaaaaaaaatccgatcgaacagtaaccataaaaattttccagctaataacgacaaccaaaaataaaataaaactagagaatctgaattattttcatgtttttggaaacaggaagctattggagttaggttacaaacgaagttcaaagaaatgcaaagagaaattcgaaaacgttcagaaatattacaaacgtactaaagaaactcgcggtggtcgtcatgatggtaaagcttacaagttcttctctcagcttgaagctctcaacactactcctccttcatcttccctcgacgttactcctctctccgtcgctaatcccattctcatgccttcttcttcttcttctccatttcccgtattctctcaaccgcaaccgcaaacgcaaacgcaaccgcctcaaacgcataatgtctcttttactcctactccaccacctcttccacttccttcaatgggtccgatatttaccggtgttactttctcgtctcatagctcatcgacggcttcaggaatggggtctgatgatgatgacgacgatatggacgttgatcaggctaacattgcgggttctagtagccgaaaacgcaaacgtggaaaccgcggtggaggcggtaaaatgatggaattgtttgaaggtttggtgagacaagtaatgcaaaagcaagcggctatgcaaaggagtttcttggaagctcttgagaagagagagcaagaacgtcttgatcgtgaagaagcttggaaacgtcaagaaatggctcggttagctcgagaacacgaggtcatgtctcaagaacgagccgcctctgcttctcgtgacgccgcaatcatttcattgattcagaaaattactggccataccattcagttacctccttctttgtcatctcaaccgcctccaccgtatcaaccgccacccgcggtcactaaacgtgtggcggaaccaccattatcaacagctcaatctcaatcacaacaaccaataatggcgattccacaacaacaaattcttcctcctcctcctccttctcatcctcacgctcatcaaccagaacagaaacaacaacaacaaccacaacaagagatggtcatgagctcggaacaatcatcattaccatcatcatcaagatggccaaaggcagagattctagcgcttataaacctgagaagtggaatggaaccaaggtaccaagataatgtacctaaaggacttctatgggaagagatctcaacttcaatgaagagaatgggatacaacagaaacgctaagagatgtaaagagaaatgggaaaacataaacaaatactacaagaaagttaaagaaagcaacaagaaacgtcctcaagatgctaagacttgtccttactttcaccgcctcgatcttctttaccgcaacaaagtactcggtagtggcggtggttctagcacttctggtctacctcaagaccaaaaacagagtccggtcactgcgatgaaaccgccacaagaaggacttgttaatgttcaacaaactcatgggtcagcttcaactgaggaagaagagcctatagaggaaagtccacaaggaacagaaaagccagaagaccttgtgatgagagagctgattcaacaacaacagcaactacaacaacaagaatcaatgataggtgagtatgaaaagattgaagagtctcacaattataataacatggaggaagaggaagatcaggaaatggatgaggaagaactagacgaggatgagaagtccgcggctttcgagattgcgtttcaaagccctgcaaacagaggaggcaatggccatacggaaccacctttcttgacaatggttcagtaa

SEQ ID NO: 107 - protein, 630 aa, Arabidopsis thaliana
MSFWDVFDFENPKTLFTSKKKKKKSDRTVTIKIFQLITTTKNKIKLENLNYFHVFGNRKLLELGYKRSSKKCKEKFENVQKYYKRTKETRGGRHDGKAYKFFSQLEALNTTPPSSSLDVTPLSVANPILMPSSSSSPFPVFSQPQPQTQTQPPQTHNVSFTPTPPPLPLPSMGPIFTGVTFSSHSSSTASGMGSDDDDDDMDVDQANIAGSSSRKRKRGNRGGGGKMMELFEGLVRQVMQKQAAMQRSFLEALEKREQERLDREEAWKRQEMARLAREHEVMSQERAASASRDAAIISLIQKITGHTIQLPPSLSSQPPPPYQPPPAVTKRVAEPPLSTAQSQSQQPIMAIPQQQILPPPPPSHPHAHQPEQKQQQQPQQEMVMSSEQSSLPSSSRWPKAEILALINLRSGMEPRYQDNVPKGLLWEEISTSMKRMGYNRNAKRCKEKWENINKYYKKVKESNKKRPQDAKTCPYFHRLDLLYRNKVLGSGGGSSTSGLPQDQKQSPVTAMKPPQEGLVNVQQTHGSASTEEEEPIEESPQGTEKPEDLVMRELIQQQQQLQQQESMIGEYEKIEESHNYNNMEEEEDQEMDEEELDEDEKSAAFEIAFQSPANRGGNGHTEPPFLTMVQ

SEQ ID NO: 108 - DNA, 1785 bp, Arabidopsis thaliana
atggagcaaggaggaggtggtggtggtaatgaagttgtggaggaagcttcacctattagttcaagacctcctgctaacaacttagaagagcttatgagattctcagccgccgcggatgacggtggattaggaggtggaggtggaggaggaggaggaggaagtgcttcttcttcatcgggaaatcgatggccgagagaagaaactttagctcttcttcggatccgatccgatatggattctacttttcgtgatgctactctcaaagctcctctttgggaacatgtttccaggaagctattggagttaggttacaaacgaagttcaaagaaatgcaaagagaaattcgaaaacgttcagaaatattacaaacgtactaaagaaactcgcggtggtcgtcatgatggtaaagcttacaagttcttctctcagcttgaagctctcaacactactcctccttcatcttccctcgacgttactcctctctccgtcgctaatcccattctcatgccttcttcttcttcttctccatttcccgtattctctcaaccgcaaccgcaaacgcaaacgcaaccgcctcaaacgcataatgtctcttttactcctactccaccacctcttccacttccttcaatgggtccgatatttaccggtgttactttctcgtctcatagctcatcgacggcttcaggaatggggtctgatgatgatgacgacgatatggacgttgatcaggctaacattgcgggttctagtagccgaaaacgcaaacgtggaaaccgcggtggaggcggtaaaatgatggaattgtttgaaggtttggtgagacaagtaatgcaaaagcaagcggctatgcaaaggagtttcttggaagctcttgagaagagagagcaagaacgtcttgatcgtgaagaagcttggaaacgtcaagaaatggctcggttagctcgagaacacgaggtcatgtctcaagaacgagccgcctctgcttctcgtgacgccgcaatcatttcattgattcagaaaattactggccataccattcagttacctccttctttgtcatctcaaccgcctccaccgtatcaaccgccacccgcggtcactaaacgtgtggcggaaccaccattatcaacagctcaatctcaatcacaacaaccaataatggcgattccacaacaacaaattcttcctcctcctcctccttctcatcctcacgctcatcaaccagaacagaaacaacaacaacaaccacaacaagagatggtcatgagctcggaacaatcatcattaccatcatcatcaagatggccaaaggcagagattctagcgcttataaacctgagaagtggaatggaaccaaggtaccaagataatgtacctaaaggacttctatgggaagagatctcaacttcaatgaagagaatgggatacaacagaaacgctaagagatgtaaagagaaatgggaaaacataaacaaatactacaagaaagttaaagaaagcaacaagaaacgtcctcaagatgctaagacttgtccttactttcaccgcctcgatcttctttaccgcaacaaagtactcggtagtggcggtggttctagcacttctggtctacctcaagaccaaaaacagagtccggtcactgcgatgaaaccgccacaagaaggacttgttaatgttcaacaaactcatgggtcagcttcaactgaggaagaagagcctatagaggaaagtccacaaggaacagaaaaggtacaaactttgcttttccttgtcaaaatgtga

SEQ ID NO: 109 - protein, 594 aa, Arabidopsis thaliana
MEQGGGGGGNEVVEEASPISSRPPANNLEELMRFSAAADDGGLGGGGGGGGGGSASSSSGNRWPREETLALLRIRSDMDSTFRDATLKAPLWEHVSRKLLELGYKRSSKKCKEKFENVQKYYKRTKETRGGRHDGKAYKFFSQLEALNTTPPSSSLDVTPLSVANPILMPSSSSSPFPVFSQPQPQTQTQPPQTHNVSFTPTPPPLPLPSMGPIFTGVTFSSHSSSTASGMGSDDDDDDMDVDQANIAGSSSRKRKRGNRGGGGKMMELFEGLVRQVMQKQAAMQRSFLEALEKREQERLDREEAWKRQEMARLAREHEVMSQERAASASRDAAIISLIQKITGHTIQLPPSLSSQPPPPYQPPPAVTKRVAEPPLSTAQSQSQQPIMAIPQQQILPPPPPSHPHAHQPEQKQQQQPQQEMVMSSEQSSLPSSSRWPKAEILALINLRSGMEPRYQDNVPKGLLWEEISTSMKRMGYNRNAKRCKEKWENINKYYKKVKESNKKRPQDAKTCPYFHRLDLLYRNKVLGSGGGSSTSGLPQDQKQSPVTAMKPPQEGLVNVQQTHGSASTEEEEPIEESPQGTEKVQTLLFLVKM

SEQ ID NO: 110 - DNA, 1881 bp, Nicotiana tabacum
atggcttctaaaccaggcattctaacagaatggccatggacatggcttgggaacttcaagtacgtggttttggcaccatatgtggctcacagcctacactcattcttcatgagcgaagatgaaagcaagagggatatcacatacttaattatatttccatttctactcttccgaatgcttcacaaccagatatggatatccttatctcgctacagaactgccaagggtgataaccgaattgttgacaagagcattgaatttgatcaagttgacagagaaagaaactgggatgatcagatcatacttaacggactgctgttctactatggatacacgaagctggagcagtctcatcacatgcctatttggaggacagatgggatcattatgacagctttgctccaaactggtcctgttgaatttctctactattggcttcacagagctttacaccaccatttcctttactctcgctatcattctcatcaccattcctccattgtcactgaacccattacttctgtgattcatccatttgcagagcatatagcatacttcttgctatttgccatcccacttctcacaactgtgctaactgggactgcttcaatagtttcatttggtggatatattacttatattgattttatgaataacatggggcattgcaactttgagatcattccaaagtggatgttctccagctttccccctctcaaatacttgatgtatacaccctcgtatcattcactccatcacactcaatttagaacaaactactcgctttttatgccaatgtacgattacatttacgatacactagacaaatcttcagacacattatacgaaaaatcacttgaaaggcaaggcaaatcgccggatgtggtgcacctaacacacctaacaaccccagaatccatttaccatctcaggctaggatttgcttcttttgcctcggaaccttacacctctaagtggtatttttggttaatgtggcctgttacattgtggtctatgatgattacttggatttatggtcacacatttactgttgagagaaatgtgttcaagagtctgaatttgcaaacttgggcgatcccaaaatatcgcatacaatattttatgcaatggcaaagagagacgattaacaactttattgaggaagctatcatggaagcagatcgaaaaggcataaaagtattgagccttggactcttaaatcaggaggagcaactgaataataatggtgagctttacataagaaggcatcctcagctcaaagtgaaggtggttgatggaagtagcctagctgttgctgtggtcctaaactctattcctaaaggaaccacacaagtggtccttggaggccatttgtcgaaagttgcaaatgcgattgcccttgccttatgccaaggaggagtaaaggttgtgacattgcgagaagaagagtacaagaagctcaaatcaagtcttacccctgaagtcgcaattaatttggttccctcaaaaacatatgcttcaaagatatggctagtaggggatggattgagtgaagatgaacaattgaaagcaccaaaaggaacattattcattcccttttcacaattcccaccaaggaaagctcgcaaggattgcctctactttcacacaccagccatgatcactccaaaacactttgaaaacgtggactcctgtgagaattggcttccaagaagagtgatgagcgcgtggcgagtagctggaatattgcacgcactgaaaggctggaatgagcatgagtgtgggaacatgatctttgatattgagaaagtctggaaagcaagtcttgatcacggttttagcccattgactatggcttctgcttctgaatccaaggcttaa

SEQ ID NO: 111 - protein, 626 aa, Nicotiana tabacum
MASKPGILTEWPWTWLGNFKYVVLAPYVAHSLHSFFMSEDESKRDITYLIIFPFLLFRMLHNQIWISLSRYRTAKGDNRIVDKSIEFDQVDRERNWDDQIILNGLLFYYGYTKLEQSHHMPIWRTDGIIMTALLQTGPVEFLYYWLHRALHHHFLYSRYHSHHHSSIVTEPITSVIHPFAEHIAYFLLFAIPLLTTVLTGTASIVSFGGYITYIDFMNNMGHCNFEIIPKWMFSSFPPLKYLMYTPSYHSLHHTQFRTNYSLFMPMYDYIYDTLDKSSDTLYEKSLERQGKSPDVVHLTHLTTPESIYHLRLGFASFASEPYTSKWYFWLMWPVTLWSMMITWIYGHTFTVERNVFKSLNLQTWAIPKYRIQYFMQWQRETINNFIEEAIMEADRKGIKVLSLGLLNQEEQLNNNGELYIRRHPQLKVKVVDGSSLAVAVVLNSIPKGTTQVVLGGHLSKVANAIALALCQGGVKVVTLREEEYKKLKSSLTPEVAINLVPSKTYASKIWLVGDGLSEDEQLKAPKGTLFIPFSQFPPRKARKDCLYFHTPAMITPKHFENVDSCENWLPRRVMSAWRVAGILHALKGWNEHECGNMIFDIEKVWKASLDHGFSPLTMASASESKA

SEQ ID NO: 112 - DNA, 1491 bp, Nicotiana tabacum
atggcagaagtagtcccaagtttctctaattcagtgaagctcaaatatgtcaaacttggttatcaataccttgttaatcatattctaacatttttgcttgtgcctattatggttggtgttactatagaggtattaagacttggccctgaagaattgctaagcatatggaattcactccactttgatcttcttcaaatcctttgctcttcttttcccatcatcttcatagccactgtttacttcatgtccaaacctcgatcaatttaccttgtagattattcatgttacaaagctccggttacctgccgagtcccattttcaactttcatggaacactctaggctcattttgaaggataatcccaagagtgtcgagttccaaatgcgtattcttgaaaggtctggccttggagaagaaacgtgcttgcctcctgctattcattatatccctccaacaccaactatggaagctgctagaggtgaagcagaagtggtcatattctcagcaattgatgacctaatgaagaaaacaggactcaagccaaaggatattgacattcttattgtcaactgcagcttgttttctccaactccatctttatcagctatggtagtgaacaaatacaagttgagaagtaacataaaaagttacaatctttctggtatgggatgtagtgctggtttaatatcaattgatttagctagggatcttcttcaagtccatccaaattcaaatgctttagttgtaagcactgagattatcacacctaattattacaaaggttcagagagagcaatgcttctaccaaattgtttgttccgtatgggtggtgcagccatactcttgtccaacaaaaggcgcgatagatacagagcaaagtacagattaatgcacgtggtccgaacacataagggtgcagatgataaggcatttaaatgtgtatttgaacaagaagatccacaagggaaagttggtattaatttatcaaaagaccttatggttatagcaggagaagctttaaaatccaacattactacaattggtcctttagttcttccagcatcagagcaactcctttttctcctcacacttattagtcggaaattttttaatcccaagttgaaaccttatattccggattttaaacaagcgtttgaacatttttgtattcatgcgggtggtcgggctgttattgatgaacttcaaaagaacctacaattgtctgctgaacatgttgaggcatcaagaatgacattgcatagatttggtaacacttcatcttcttcactatggtatgagatgagttatattgaggctaaaggtaggatgaagaaaggtgatagagtttggcagattgcatttgggagtggatttaagtgtaacagtgctgtttggaaatgtaacagaacaataaagacaccaactgatgggccatggcaagattgcattgataggtatccagtccacattccagagattgtcaagctctaa

SEQ ID NO: 113 - protein, 496 aa, Nicotiana tabacum
MAEVVPSFSNSVKLKYVKLGYQYLVNHILTFLLVPIMVGVTIEVLRLGPEELLSIWNSLHFDLLQILCSSFPIIFIATVYFMSKPRSIYLVDYSCYKAPVTCRVPFSTFMEHSRLILKDNPKSVEFQMRILERSGLGEETCLPPAIHYIPPTPTMEAARGEAEVVIFSAIDDLMKKTGLKPKDIDILIVNCSLFSPTPSLSAMVVNKYKLRSNIKSYNLSGMGCSAGLISIDLARDLLQVHPNSNALVVSTEIITPNYYKGSERAMLLPNCLFRMGGAAILLSNKRRDRYRAKYRLMHVVRTHKGADDKAFKCVFEQEDPQGKVGINLSKDLMVIAGEALKSNITTIGPLVLPASEQLLFLLTLISRKFFNPKLKPYIPDFKQAFEHFCIHAGGRAVIDELQKNLQLSAEHVEASRMTLHRFGNTSSSSLWYEMSYIEAKGRMKKGDRVWQIAFGSGFKCNSAVWKCNRTIKTPTDGPWQDCIDRYPVHIPEIVKL

SEQ ID NO: 114 - DNA, 1050 bp, Nicotiana tabacum
atgggaaggccaccttgttgtgataaaataggggtgaagaaaggaccatggacaccagaagaggatatcatcttggtttcatacattcaacaacatggtcctggtaactggagagctgttcccagtaatactggtttgcttagatgcagcaaaagctgtagacttagatggactaattatctccgtccgggaatcaaacgtggcaacttcacagaacatgaagaaaagatgattattcacctccaagctcttcttggcaacagatgggctgcgatagcatcatatctcccacaaaggacggacaacgatataaaaaattactggaatactcatctgagaaagaagctgaagaaacttcaagggaatgatgagaatagtaatcaagagggaatacgctcatcgtctcaatcaaatgtctcaaaaggacagtgggagaggaggcttcaaactgatatccacatggctaaaaaagccctttgtgaggctttgtcccttgacaaatctgattctccgccaaataatcctatccctcaacctgttcaatcatcttgtacttatgcatctagtgctgaaaatatttctcgattgcttcaaaattggatgaaaaattcccccaaatcatctcaatttagtcaatcaaactcggagtgtactactcaaagctcctttaacaatttatcaatcgggcagggttcgagttctagtcctagtgaagggaccataagtgcaacaacacccgagggttttgatccgctctttagcttcaattcatccaatactgatatgttggcagatgagagtaacgctttcacacctgaaaatgctaggatttttcaagttgaaagcaagccagatttgccgaatctgaatgctgaaaatggatttttatttcaagaggagagcaagccaagtttggaatcggaagtgccattaactttgctggagaagtggctctttgatgatgctattaatgcaccagcacaagaaaacctaatgggattgggaataggaatgggaatgaccttgggtgatgcttctgatttgttttga

SEQ ID NO: 115 - protein, 349 aa, Nicotiana tabacum
MGRPPCCDKIGVKKGPWTPEEDIILVSYIQQHGPGNWRAVPSNTGLLRCSKSCRLRWTNYLRPGIKRGNFTEHEEKMIIHLQALLGNRWAAIASYLPQRTDNDIKNYWNTHLRKKLKKLQGNDENSNQEGIRSSSQSNVSKGQWERRLQTDIHMAKKALCEALSLDKSDSPPNNPIPQPVQSSCTYASSAENISRLLQNWMKNSPKSSQFSQSNSECTTQSSFNNLSIGQGSSSSPSEGTISATTPEGFDPLFSFNSSNTDMLADESNAFTPENARIFQVESKPDLPNLNAENGFLFQEESKPSLESEVPLTLLEKWLFDDAINAPAQENLMGLGIGMGMTLGDASDLF

SEQ ID NO: 116 - DNA, 1860 bp, Oryza sativa
atgggtgccgcattcttgtcgtcgtggccatgggataacctcggcgcgtacaagtatgtgttgtacgcgccgctggtggggaaggcggtggcggggcgggcgtgggagcgggcgagccccgaccactggctgctgctgctgctcgtcctcttcggcgtcagggccttgacctaccagctctggagctcgttcagcaacatgctcttcgccacccgccgccgccgcatcgtccgcgacggcgtcgacttcggccagatcgacagggagtgggactgggacaacttcttgatactgcaggtgcacatggcggcggcggcgttctacgcgttcccgtcgctgcggcacctcccgctgtgggacgccaggggcctcgccgtcgccgcgctcctccacgtcgccgccaccgagcccctgttctacgccgcgcacagggcgttccaccgcggccacctcttctcctgctaccacttgcaacaccactccgccaaggtgccccagccattcacagcggggttcgcgacgccgctggagcagctggtgctgggggcgctcatggcggtgccgctggcggcggcgtgcgcggcggggcacggctccgtcgcgctggccttcgcctacgtgctgggtttcgacaacctccgcgccatgggccactgcaacgtcgaggtgttccccggcggcctcttccagtcgctccccgtcctcaaataccttatctacaccccaacgtaccacacgatccatcacaccaaggaggatgccaacttctgcctgttcatgccgctgttcgacctcatcggtggcaccctcgacgcccagtcctgggagatgcagaagaaaaccagcgcaggggtggacgaggtgccggagttcgtgttcctggcgcacgtggtggacgtgatgcagtcgctgcacgtgccgttcgtgctgcggacgttcgcgtcgacgcccttctcggtgcagccgttcctgctgcccatgtggccgttcgcgttcctcgtcatgctcatgatgtgggcgtggtccaagaccttcgtcatctcctgctaccgcctccgcggccgcctccaccagatgtgggccgtcccccgctacggcttccactacttcctgccgttcgccaaggacggcatcaacaaccagatcgagctcgccatcctcagggcggacaagatgggcgccaaggtggtcagcctcgccgctctcaacaagaatgaggcgctgaacggtggcgggacgctgttcgtgaacaagcacccggggctccgggtgcgcgtcgtccacggcaacacgctgacggcggcggtgatcctcaacgagatcccgcagggcaccaccgaggtgttcatgaccggcgccacgtccaagctcggccgcgccatcgccctctacctctgcaggaagaaagtccgcgtcatgatgatgacgctgtcgacggagagattccagaagatacagagggaggcgacgccggagcaccagcagtacctggtgcaggtgaccaagtacaggtcggcgcagcactgcaagacgtggatcgtcggcaagtggctgtcgccgagggagcagcgttgggcgccgccggggacgcacttccaccagttcgtcgtccccccaatcatcggcttccgccgcgactgcacctacggcaagctcgccgccatgcgcctccccaaggacgtccagggcctcggcgcctgcgagtactcgctggagcgcggggtggtgcacgcgtgccacgccggaggcgtggtgcacttcctggaggggtacacgcaccacgaggtgggcgccatcgacgtggaccgcatcgacgtcgtgtgggaggcggcgctcaggcacggcctccggcctgtctga

SEQ ID NO: 117 - protein, 619 aa, Oryza sativa
MGAAFLSSWPWDNLGAYKYVLYAPLVGKAVAGRAWERASPDHWLLLLLVLFGVRALTYQLWSSFSNMLFATRRRRIVRDGVDFGQIDREWDWDNFLILQVHMAAAAFYAFPSLRHLPLWDARGLAVAALLHVAATEPLFYAAHRAFHRGHLFSCYHLQHHSAKVPQPFTAGFATPLEQLVLGALMAVPLAAACAAGHGSVALAFAYVLGFDNLRAMGHCNVEVFPGGLFQSLPVLKYLIYTPTYHTIHHTKEDANFCLFMPLFDLIGGTLDAQSWEMQKKTSAGVDEVPEFVFLAHVVDVMQSLHVPFVLRTFASTPFSVQPFLLPMWPFAFLVMLMMWAWSKTFVISCYRLRGRLHQMWAVPRYGFHYFLPFAKDGINNQIELAILRADKMGAKVVSLAALNKNEALNGGGTLFVNKHPGLRVRVVHGNTLTAAVILNEIPQGTTEVFMTGATSKLGRAIALYLCRKKVRVMMMTLSTERFQKIQREATPEHQQYLVQVTKYRSAQHCKTWIVGKWLSPREQRWAPPGTHFHQFVVPPIIGFRRDCTYGKLAAMRLPKDVQGLGACEYSLERGVVHACHAGGVVHFLEGYTHHEVGAIDVDRIDVVWEAALRHGLRPV

SEQ ID NO: 118 - DNA, 1317 bp, Arabidopsis thaliana
atgaagaagcgcttaaccacttccacttgttcttcttctccatcttcctctgtttcttcttctactactacttcctctcctattcagtcggaggctccaaggcctaaacgagccaaaagggctaagaaatcttctccttctggtgataaatctcataacccgacaagccctgcttctacccgacgcagctctatctacagaggagtcactagacatagatggactgggagattcgaggctcatctttgggacaaaagctcttggaattcgattcagaacaagaaaggcaaacaagtttatctgggagcatatgacagtgaagaagcagcagcacatacgtacgatctggctgctctcaagtactggggacccgacaccatcttgaattttccggcagagacgtacacaaaggaattggaagaaatgcagagagtgacaaaggaagaatatttggcttctctccgccgccagagcagtggtttctccagaggcgtctctaaatatcgcggcgtcgctaggcatcaccacaacggaagatgggaggctcggatcggaagagtgtttgggaacaagtacttgtacctcggcacctataatacgcaggaggaagctgctgcagcatatgacatggctgcgattgagtatcgaggcgcaaacgcggttactaatttcgacattagtaattacattgaccggttaaagaagaaaggtgttttcccgttccctgtgaaccaagctaaccatcaagagggtattcttgttgaagccaaacaagaagttgaaacgagagaagcgaaggaagagcctagagaagaagtgaaacaacagtacgtggaagaaccaccgcaagaagaagaagagaaggaagaagagaaagcagagcaacaagaagcagagattgtaggatattcagaagaagcagcagtggtcaattgctgcatagactcttcaaccataatggaaatggatcgttgtggggacaacaatgagctggcttggaacttctgtatgatggatacagggttttctccgtttttgactgatcagaatctcgcgaatgagaatcccatagagtatccggagctattcaatgagttagcatttgaggacaacatcgacttcatgttcgatgatgggaagcacgagtgcttgaacttggaaaatctggattgttgcgtggtgggaagagagagcccaccctcttcttcttcaccattgtcttgcttatctactgactctgcttcatcaacaacaacaacaacaacctcggtttcttgtaactatttgtttcagggcttgttcgttggttctgaataa

SEQ ID NO: 119 - protein, 438 aa, Arabidopsis thaliana
MKKRLTTSTCSSSPSSSVSSSTTTSSPIQSEAPRPKRAKRAKKSSPSGDKSHNPTSPASTRRSSIYRGVTRHRWTGRFEAHLWDKSSWNSIQNKKGKQVYLGAYDSEEAAAHTYDLAALKYWGPDTILNFPAETYTKELEEMQRVTKEEYLASLRRQSSGFSRGVSKYRGVARHHHNGRWEARIGRVFGNKYLYLGTYNTQEEAAAAYDMAAIEYRGANAVTNFDISNYIDRLKKKGVFPFPVNQANHQEGILVEAKQEVETREAKEEPREEVKQQYVEEPPQEEEEKEEEKAEQQEAEIVGYSEEAAVVNCCIDSSTIMEMDRCGDNNELAWNFCMMDTGFSPFLTDQNLANENPIEYPELFNELAFEDNIDFMFDDGKHECLNLENLDCCVVGRESPPSSSSPLSCLSTDSASSTTTTTTSVSCNYLFQGLFVGSE

SEQ ID NO: 120 - DNA, 870 bp, Arabidopsis thaliana
atgcagagagtgacaaaggaagaatatttggcttctctccgccgccagagcagtggtttctccagaggcgtctctaaatatcgcggcgtcgctaggcatcaccacaacggaagatgggaggctcggatcggaagagtgtttgggaacaagtacttgtacctcggcacctataatacgcaggaggaagctgctgcagcatatgacatggctgcgattgagtatcgaggcgcaaacgcggttactaatttcgacattagtaattacattgaccggttaaagaagaaaggtgttttcccgttccctgtgaaccaagctaaccatcaagagggtattcttgttgaagccaaacaagaagttgaaacgagagaagcgaaggaagagcctagagaagaagtgaaacaacagtacgtggaagaaccaccgcaagaagaagaagagaaggaagaagagaaagcagagcaacaagaagcagagattgtaggatattcagaagaagcagcagtggtcaattgctgcatagactcttcaaccataatggaaatggatcgttgtggggacaacaatgagctggcttggaacttctgtatgatggatacagggttttctccgtttttgactgatcagaatctcgcgaatgagaatcccatagagtatccggagctattcaatgagttagcatttgaggacaacatcgacttcatgttcgatgatgggaagcacgagtgcttgaacttggaaaatctggattgttgcgtggtgggaagagagagcccaccctcttcttcttcaccattgtcttgcttatctactgactctgcttcatcaacaacaacaacaacaacctcggtttcttgtaactatttggtctga

SEQ ID NO: 121 - protein, 289 aa, Arabidopsis thaliana
MQRVTKEEYLASLRRQSSGFSRGVSKYRGVARHHHNGRWEARIGRVFGNKYLYLGTYNTQEEAAAAYDMAAIEYRGANAVTNFDISNYIDRLKKKGVFPFPVNQANHQEGILVEAKQEVETREAKEEPREEVKQQYVEEPPQEEEEKEEEKAEQQEAEIVGYSEEAAVVNCCIDSSTIMEMDRCGDNNELAWNFCMMDTGFSPFLTDQNLANENPIEYPELFNELAFEDNIDFMFDDGKHECLNLENLDCCVVGRESPPSSSSPLSCLSTDSASSTTTTTTSVSCNYLV

SEQ ID NO: 122 - DNA, 1293 bp, Arabidopsis thaliana
atgaagaagcgcttaaccacttccacttgttcttcttctccatcttcctctgtttcttcttctactactacttcctctcctattcagtcggaggctccaaggcctaaacgagccaaaagggctaagaaatcttctccttctggtgataaatctcataacccgacaagccctgcttctacccgacgcagctctatctacagaggagtcactagacatagatggactgggagattcgaggctcatctttgggacaaaagctcttggaattcgattcagaacaagaaaggcaaacaagtttatctgggagcatatgacagtgaagaagcagcagcacatacgtacgatctggctgctctcaagtactggggacccgacaccatcttgaattttccggcagagacgtacacaaaggaattggaagaaatgcagagagtgacaaaggaagaatatttggcttctctccgccgccagagcagtggtttctccagaggcgtctctaaatatcgcggcgtcgctaggcatcaccacaacggaagatgggaggctcggatcggaagagtgtttgggaacaagtacttgtacctcggcacctataatacgcaggaggaagctgctgcagcatatgacatggctgcgattgagtatcgaggcgcaaacgcggttactaatttcgacattagtaattacattgaccggttaaagaagaaaggtgttttcccgttccctgtgaaccaagctaaccatcaagagggtattcttgttgaagccaaacaagaagttgaaacgagagaagcgaaggaagagcctagagaagaagtgaaacaacagtacgtggaagaaccaccgcaagaagaagaagagaaggaagaagagaaagcagagcaacaagaagcagagattgtaggatattcagaagaagcagcagtggtcaattgctgcatagactcttcaaccataatggaaatggatcgttgtggggacaacaatgagctggcttggaacttctgtatgatggatacagggttttctccgtttttgactgatcagaatctcgcgaatgagaatcccatagagtatccggagctattcaatgagttagcatttgaggacaacatcgacttcatgttcgatgatgggaagcacgagtgcttgaacttggaaaatctggattgttgcgtggtgggaagagagagcccaccctcttcttcttcaccattgtcttgcttatctactgactctgcttcatcaacaacaacaacaacaacctcggtttcttgtaactatttggtctga

SEQ ID NO: 123 - protein, 430 aa, Arabidopsis thaliana
MKKRLTTSTCSSSPSSSVSSSTTTSSPIQSEAPRPKRAKRAKKSSPSGDKSHNPTSPASTRRSSIYRGVTRHRWTGRFEAHLWDKSSWNSIQNKKGKQVYLGAYDSEEAAAHTYDLAALKYWGPDTILNFPAETYTKELEEMQRVTKEEYLASLRRQSSGFSRGVSKYRGVARHHHNGRWEARIGRVFGNKYLYLGTYNTQEEAAAAYDMAAIEYRGANAVTNFDISNYIDRLKKKGVFPFPVNQANHQEGILVEAKQEVETREAKEEPREEVKQQYVEEPPQEEEEKEEEKAEQQEAEIVGYSEEAAVVNCCIDSSTIMEMDRCGDNNELAWNFCMMDTGFSPFLTDQNLANENPIEYPELFNELAFEDNIDFMFDDGKHECLNLENLDCCVVGRESPPSSSSPLSCLSTDSASSTTTTTTSVSCNYLV

SEQ ID NO: 124 - DNA, 1095 bp, Arabidopsis thaliana
atgattttgtttgttttaataaagatctggactttaactgataaatttggtttctttgatctgttgtttgatctcaacttcgtcacaacttcaccagtttatctgggagcatatgacagtgaagaagcagcagcacatacgtacgatctggctgctctcaagtactggggacccgacaccatcttgaattttccggcagagacgtacacaaaggaattggaagaaatgcagagagtgacaaaggaagaatatttggcttctctccgccgccagagcagtggtttctccagaggcgtctctaaatatcgcggcgtcgctaggcatcaccacaacggaagatgggaggctcggatcggaagagtgtttgggaacaagtacttgtacctcggcacctataatacgcaggaggaagctgctgcagcatatgacatggctgcgattgagtatcgaggcgcaaacgcggttactaatttcgacattagtaattacattgaccggttaaagaagaaaggtgttttcccgttccctgtgaaccaagctaaccatcaagagggtattcttgttgaagccaaacaagaagttgaaacgagagaagcgaaggaagagcctagagaagaagtgaaacaacagtacgtggaagaaccaccgcaagaagaagaagagaaggaagaagagaaagcagagcaacaagaagcagagattgtaggatattcagaagaagcagcagtggtcaattgctgcatagactcttcaaccataatggaaatggatcgttgtggggacaacaatgagctggcttggaacttctgtatgatggatacagggttttctccgtttttgactgatcagaatctcgcgaatgagaatcccatagagtatccggagctattcaatgagttagcatttgaggacaacatcgacttcatgttcgatgatgggaagcacgagtgcttgaacttggaaaatctggattgttgcgtggtgggaagagagagcccaccctcttcttcttcaccattgtcttgcttatctactgactctgcttcatcaacaacaacaacaacaacctcggtttcttgtaactatttggtctga

SEQ ID NO: 125 - protein, 364 aa, Arabidopsis thaliana
MILFVLIKIWTLTDKFGFFDLLFDLNFVTTSPVYLGAYDSEEAAAHTYDLAALKYWGPDTILNFPAETYTKELEEMQRVTKEEYLASLRRQSSGFSRGVSKYRGVARHHHNGRWEARIGRVFGNKYLYLGTYNTQEEAAAAYDMAAIEYRGANAVTNFDISNYIDRLKKKGVFPFPVNQANHQEGILVEAKQEVETREAKEEPREEVKQQYVEEPPQEEEEKEEEKAEQQEAEIVGYSEEAAVVNCCIDSSTIMEMDRCGDNNELAWNFCMMDTGFSPFLTDQNLANENPIEYPELFNELAFEDNIDFMFDDGKHECLNLENLDCCVVGRESPPSSSSPLSCLSTDSASSTTTTTTSVSCNYLV

SEQ ID NO: 126 - DNA, 912 bp, Arabidopsis thaliana
atggcaaaagtctctgggaggagcaagaaaacaatcgttgacgatgaaatcagcgataaaacagcgtctgcgtctgagtctgcgtccattgccttaacatccaaacgcaaacgtaagtcgccgcctcgaaacgctcctcttcaacgcagctccccttacagaggcgtcacaaggcatagatggactgggagatacgaagcgcatttgtgggataagaacagctggaacgatacacagaccaagaaaggacgtcaagtttatctaggggcttacgacgaagaagaagcagcagcacgtgcctacgacttagcagcattgaagtactggggacgagacacactcttgaacttccctttgccgagttatgacgaagacgtcaaagaaatggaaggccaatccaaggaagagtatattggatcattgagaagaaaaagtagtggattttctcgcggtgtatcaaaatacagaggcgttgcaaggcatcaccataatgggagatgggaagctagaattggaagggtgtttgccacgcaagaagaagcagcaatcgcctacgacatcgcggcaatagagtaccgtggacttaacgccgttaccaatttcgacgtcagccgttatctaaaccctaacgccgccgcggataaagccgattccgattctaagcccattcgaagccctagtcgcgagcccgaatcgtcggatgataacaaatctccgaaatcagaggaagtaatcgaaccatctacatcgccggaagtgattccaactcgccggagcttccccgacgatatccagacgtattttgggtgtcaagattccggcaagttagcgactgaggaagacgtaatattcgattgtttcaattcttatataaatcctggcttctataacgagtttgattatggaccttaa

SEQ ID NO: 127 - protein, 303 aa, Arabidopsis thaliana
MAKVSGRSKKTIVDDEISDKTASASESASIALTSKRKRKSPPRNAPLQRSSPYRGVTRHRWTGRYEAHLWDKNSWNDTQTKKGRQVYLGAYDEEEAAARAYDLAALKYWGRDTLLNFPLPSYDEDVKEMEGQSKEEYIGSLRRKSSGFSRGVSKYRGVARHHHNGRWEARIGRVFATQEEAAIAYDIAAIEYRGLNAVTNFDVSRYLNPNAAADKADSDSKPIRSPSREPESSDDNKSPKSEEVIEPSTSPEVIPTRRSFPDDIQTYFGCQDSGKLATEEDVIFDCFNSYINPGFYNEFDYGP

SEQ ID NO: 128 - DNA, 942 bp, Arabidopsis thaliana
atggcaaaagtctctgggaggagcaagaaaacaatcgttgacgatgaaatcagcgataaaacagcgtctgcgtctgagtctgcgtccattgccttaacatccaaacgcaaacgtaagtcgccgcctcgaaacgctcctcttcaacgcagctccccttacagaggcgtcacaaggcatagatggactgggagatacgaagcgcatttgtgggataagaacagctggaacgatacacagaccaagaaaggacgtcaagtttatctaggggcttacgacgaagaagaagcagcagcacgtgcctacgacttagcagcattgaagtactggggacgagacacactcttgaacttccctttgccgagttatgacgaagacgtcaaagaaatggaaggccaatccaaggaagagtatattggatcattgagaagaaaaagtagtggattttctcgcggtgtatcaaaatacagaggcgttgcaaggcatcaccataatgggagatgggaagctagaattggaagggtgtttggtaataaatatctatatcttggaacatacgccacgcaagaagaagcagcaatcgcctacgacatcgcggcaatagagtaccgtggacttaacgccgttaccaatttcgacgtcagccgttatctaaaccctaacgccgccgcggataaagccgattccgattctaagcccattcgaagccctagtcgcgagcccgaatcgtcggatgataacaaatctccgaaatcagaggaagtaatcgaaccatctacatcgccggaagtgattccaactcgccggagcttccccgacgatatccagacgtattttgggtgtcaagattccggcaagttagcgactgaggaagacgtaatattcgattgtttcaattcttatataaatcctggcttctataacgagtttgattatggaccttaa

SEQ ID NO: 129 - DNA, 942 bp, Arabidopsis thaliana; identical to SEQ ID NO: 128

SEQ ID NO: 130 - DNA, 714 bp, Arabidopsis thaliana
atgatgaatgctgactcatcaagtgcagtttatctaggggcttacgacgaagaagaagcagcagcacgtgcctacgacttagcagcattgaagtactggggacgagacacactcttgaacttccctttgccgagttatgacgaagacgtcaaagaaatggaaggccaatccaaggaagagtatattggatcattgagaagaaaaagtagtggattttctcgcggtgtatcaaaatacagaggcgttgcaaggcatcaccataatgggagatgggaagctagaattggaagggtgtttggtaataaatatctatatcttggaacatacgccacgcaagaagaagcagcaatcgcctacgacatcgcggcaatagagtaccgtggacttaacgccgttaccaatttcgacgtcagccgttatctaaaccctaacgccgccgcggataaagccgattccgattctaagcccattcgaagccctagtcgcgagcccgaatcgtcggatgataacaaatctccgaaatcagaggaagtaatcgaaccatctacatcgccggaagtgattccaactcgccggagcttccccgacgatatccagacgtattttgggtgtcaagattccggcaagttagcgactgaggaagacgtaatattcgattgtttcaattcttatataaatcctggcttctataacgagtttgattatggaccttaa

SEQ ID NO: 131 - protein, 237 aa, Arabidopsis thaliana
MMNADSSSAVYLGAYDEEEAAARAYDLAALKYWGRDTLLNFPLPSYDEDVKEMEGQSKEEYIGSLRRKSSGFSRGVSKYRGVARHHHNGRWEARIGRVFGNKYLYLGTYATQEEAAIAYDIAAIEYRGLNAVTNFDVSRYLNPNAAADKADSDSKPIRSPSREPESSDDNKSPKSEEVIEPSTSPEVIPTRRSFPDDIQTYFGCQDSGKLATEEDVIFDCFNSYINPGFYNEFDYGP

SEQ ID NO: 132 - DNA, 696 bp, Arabidopsis thaliana
atgaattccaccgaaattggggcttacgacgaagaagaagcagcagcacgtgcctacgacttagcagcattgaagtactggggacgagacacactcttgaacttccctttgccgagttatgacgaagacgtcaaagaaatggaaggccaatccaaggaagagtatattggatcattgagaagaaaaagtagtggattttctcgcggtgtatcaaaatacagaggcgttgcaaggcatcaccataatgggagatgggaagctagaattggaagggtgtttggtaataaatatctatatcttggaacatacgccacgcaagaagaagcagcaatcgcctacgacatcgcggcaatagagtaccgtggacttaacgccgttaccaatttcgacgtcagccgttatctaaaccctaacgccgccgcggataaagccgattccgattctaagcccattcgaagccctagtcgcgagcccgaatcgtcggatgataacaaatctccgaaatcagaggaagtaatcgaaccatctacatcgccggaagtgattccaactcgccggagcttccccgacgatatccagacgtattttgggtgtcaagattccggcaagttagcgactgaggaagacgtaatattcgattgtttcaattcttatataaatcctggcttctataacgagtttgattatggaccttaa

SEQ ID NO: 133 - protein, 231 aa, Arabidopsis thaliana
MNSTEIGAYDEEEAAARAYDLAALKYWGRDTLLNFPLPSYDEDVKEMEGQSKEEYIGSLRRKSSGFSRGVSKYRGVARHHHNGRWEARIGRVFGNKYLYLGTYATQEEAAIAYDIAAIEYRGLNAVTNFDVSRYLNPNAAADKADSDSKPIRSPSREPESSDDNKSPKSEEVIEPSTSPEVIPTRRSFPDDIQTYFGCQDSGKLATEEDVIFDCFNSYINPGFYNEFDYGP

SEQ ID NO: 134 - DNA, 2193 bp, Solanum lycopersicum
atgtttaataaccaccagcacttgctcgatatatcgtcctcagctcaacgaacacctgataacgagttggatttcattcgtgatgaagagtttgatagcaactctggtgctgataacatggaagctcccaattcaggtgatgacgatcaagctgatccaaaccaacctccaaacaagaagaagcgttatcatcgccacactcagaatcagattcaggaaatggagtccttttacaaggaatgcaatcatccagatgacaagcaaaggaaggaattgggaagaagacttggtttggagccattacaagtgaaattttggttccagaacaagcgtactcagatgaaggctcaacatgagcgatgtgagaacacacagttgaggaatgaaaatgagaagcttcgcgctgagaacataaggtacaaagaagctttgagtaatgcagcatgcccaaattgtggagggccagcagctataggagagatgtcatttgatgagcatcagttgaggattgaaaatgctcgtcttagagatgagattgacaggataactggaatagctggaaagtatgttggtaaatcagcccttggatattctcatcaacttcctcttcctcagcccgaagctcctcgggttctggatcttgcttttgggcctcaatcgggcctgcttggagaaatgtacgctgctggtgaccttctaagaactgctgttacgggccttacagatgctgagaagcccgtggtcattgagcttgctgttactgcaatggaggaacttataaggatggctcaaactgaagagccattatggttgccaagctcaggctctgagactttatgtgagcaagaatatgctcgtattttccctcgaggccttggacctaagccagctacactcaattctgaagcctcacgagaatctgctgttgtgattatgaatcatatcaatttagttgagattttgatggatgtgaaccaatggactactgtttttgctggtctggtgtcaaaagcaatgactcttgaagtcttatcaactggtgtcgcaggaaatcacaatggagcattgcaagtgatgacagcagaatttcaagttccatctccacttgttccaactcgggagaactatttcttaagatactgtaaacaacatggtgaagggacttgggtagtggttgatgtttccctggacaacttgcgcactgtttcagttccgcgttgcagaagaaggccatctggttgtttaatccaagaaatgccaaatggttactcaagggttatatgggttgaacacgttgaggtggatgaaaatgctgtccatgacatctacaaacctcttgtcaattctgggattgcatttggagcaaaacgctgggtagcaactttagatagacaatgtgaacgccttgcaagtgtgttggcgcttaacatcccaacaggagatgttggaatcattactagtccagctggtcgaaagagtatgctaaaacttgctgagagaatggtgatgagcttttgtgctggagttggtgcatcgacaactcacatatggacaactttgtctggaagtggtgcggatgatgttagagtcatgactaggaagagtatcgatgatccagggagacctcctggtattgtgctgagtgctgcaacatctttttggcttccagtttctcctaagagagtgtttgattttctccgcgatgagaactctagaaatgagtgggatattctttcaaatggtgggattgttcaggaaatggcacacattgcaaatggtcgtgatccaggaaactgtgtttctctactccgtgtcaatactggaacaaactctaaccagagtaacatgctgatactccaagagagcacaactgatgtaacaggatcttacgtcatttacgctccagttgatattgctgcaatgaacgtggtgttaggtgggggtgaccctgactatgttgctctgttgccatctggttttgctattcttccagacggaccgatgaattatcatggtggaggtaattcagaaattgattctcctggtggatcgctactaactgtagcatttcagatattggttgattcagtcccaactgcaaagctttcccttggctctgttgcgactgttaatagtctcatcaaatgcaccgttgaaaagatcaaaggtgctgtaacttccgcaaatgcatga

SEQ ID NO: 135 - protein, 730 aa, Solanum lycopersicum
MFNNHQHLLDISSSAQRTPDNELDFIRDEEFDSNSGADNMEAPNSGDDDQADPNQPPNKKKRYHRHTQNQIQEMESFYKECNHPDDKQRKELGRRLGLEPLQVKFWFQNKRTQMKAQHERCENTQLRNENEKLRAENIRYKEALSNAACPNCGGPAAIGEMSFDEHQLRIENARLRDEIDRITGIAGKYVGKSALGYSHQLPLPQPEAPRVLDLAFGPQSGLLGEMYAAGDLLRTAVTGLTDAEKPVVIELAVTAMEELIRMAQTEEPLWLPSSGSETLCEQEYARIFPRGLGPKPATLNSEASRESAVVIMNHINLVEILMDVNQWTTVFAGLVSKAMTLEVLSTGVAGNHNGALQVMTAEFQVPSPLVPTRENYFLRYCKQHGEGTWVVVDVSLDNLRTVSVPRCRRRPSGCLIQEMPNGYSRVIWVEHVEVDENAVHDIYKPLVNSGIAFGAKRWVATLDRQCERLASVLALNIPTGDVGIITSPAGRKSMLKLAERMVMSFCAGVGASTTHIWTTLSGSGADDVRVMTRKSIDDPGRPPGIVLSAATSFWLPVSPKRVFDFLRDENSRNEWDILSNGGIVQEMAHIANGRDPGNCVSLLRVNTGTNSNQSNMLILQESTTDVTGSYVIYAPVDIAAMNVVLGGGDPDYVALLPSGFAILPDGPMNYHGGGNSEIDSPGGSLLTVAFQILVDSVPTAKLSLGSVATVNSLIKCTVEKIKGAVTSANA

SEQ ID NO: 136 - DNA, 1164 bp, Nicotiana tomentosa
atgggaagaaagccttgttgttctaaagaaggattaaacaaaggggcatggactcctatggaggataaaattctaatagattatatcaaagtaaatggtgaagggaaatggagaaatcttcccaaaagagctggtcttaaaagatgtggaaagagttgcagactaaggtggctgaattatctaaggccagacattaagaggggaaatataactccagatgaagaagatctcattatcagacttcataaacttcttggaaatagatggtctctgatagctggaaggctaccaggacgaacagacaatgaaatcaagaattattggaacacaaacatcggcaaaaaactacaacaaggagttgctcctggtcagccaaaccgcataatatcttccattaatcgtcagcgccctcgttctagtcatgccaaatcttccaagtccgacccagttacccaaccaaacaaaaataatcaagaacacacagttcctaatcaggattcacattatttgctaacagacgttggattcggaggatcatcgtcttcttcatccccgtgtttggttatccgcacaaaggcaattaggtgcactaaagtttttattactcctcctcctactagtagttcggttgctgagccacagaatgttgatcagtctcacaatgagattgctcaaagggctagtaattctcactcagtcttcccaccttgcaccaggaatcccgttgagttcttacgctttcatgttgacaactcaattcttgataatgataacgatgacaaggtaatggcggaggatttgacaatagaaaatgcaaatactattgtagcatcgtcctcatcatcgtcatcattatcagtgtcatctttgtccgagcagcaacaaccaatatcaggatcaaaaccaactttctatggagaattggaaaattataactttaattttatgtttggttttgatatggacgatccttttctttctgagcttctaaatgcacctgatatatgtgaaaacttggagaatacaactactgttggagatagttgcagcaaaaacgaaaaggaaaggagctatttcccttcgaattatagtcaaacaacattgttcgcagaagatacgcaacacaacgatttggaactttggattaatgggttctcctcttga

SEQ ID NO: 137 - protein, 386 aa, Nicotiana tomentosa
MGRKPCCSKEGLNKGAWTPMEDKILIDYIKVNGEGKWRNLPKRAGLKRCGKSCRLRWLNYLRPDIKRGNITPDEEDLIIRLHKLLGNRWSLIAGRLPGRTDNEIKNYWNTNIGKKLQQGVAPGQPNRIISSINRQRPRSSHAKSSKSDPVTQPNKNNQEHTVPNQDSHYLLTDVGFGGSSSSSSPCLVIRTKAICTKVFITPPPTSSSVAEPQNVDQSHNEIAQRASNSHSVFPPCTRNPVEFLRFHVDNSILDNDNDDKVMAEDLTIENANTIVASSSSSSSLSVSSLSEQQQPISGSKPTFYGELENYNFNFMFGFDMDDPFLSELLNAPDICENLENTTTVGDSCSKNEKERSYFPSNYSQTTLFAEDTQHNDLELWINGFSS

SEQ ID NO: 138 - DNA, 687 bp, Arabidopsis thaliana
atgagaataaggagaagagatgaaaaagagaatcaagaatacaagaaaggtttatggacagttgaagaagacaacatccttatggactatgttcttaatcatggcactggccaatggaaccgcatcgtcagaaaaactgggctaaagagatgtgggaaaagttgtagactgagatggatgaattatttgagccctaatgtgaacaaaggcaatttcactgaacaagaagaagacctcattattcgtctccacaagctcctcggcaatagatggtctttgatagctaaaagagtaccgggaagaacagataaccaagtcaagaactactggaacactcatctcagcaaaaaactcgtcggagattactcctccgccgtcaaaaccaccggagaagacgacgactctccaccgtcattgttcatcactgccgccacaccttcttcttgtcatcatcaacaagaaaatatctacgagaatatagccaagagctttaacggcgtcgtatcagcttcgtacgaggataaaccaaaacaagaactggctcaaaaagatgtcctaatggcaactactaatgatccaagtcactattatggcaataacgctttatgggttcatgacgacgattttgagcttagttcactcgtaatgatgaattttgcttctggtgatgttgagtactgcctttag

SEQ ID NO: 139 - protein, 228 aa, Arabidopsis thaliana
MRIRRRDEKENQEYKKGLWTVEEDNILMDYVLNHGTGQWNRIVRKTGLKRCGKSCRLRWMNYLSPNVNKGNFTEQEEDLIIRLHKLLGNRWSLIAKRVPGRTDNQVKNYWNTHLSKKLVGDYSSAVKTTGEDDDSPPSLFITAATPSSCHHQQENIYENIAKSFNGVVSASYEDKPKQELAQKDVLMATTNDPSHYYGNNALWVHDDDFELSSLVMMNFASGDVEYCL

SEQ ID NO: 140 - DNA, 2331 bp, Arabidopsis thaliana
atgaagtcgatcgatggctgccaatgctgtagctggccatgttttaaactactcaattcaaagaagctagctagggacaggatttgtatgtcaatggccgtcgacatgtcttccaaacaacccaccaaagactttttctcctctccagccctctctctatctctcgctgggatattccggaatgcatcctccggcagcaccaaccctgaggaggatttcctgggcagaagagtagttgacgatgaggatcgcactgtggagatgagcagcgagaactcaggacccacgagatccagatcagaggaggatttggagggtgaggatcacgacgatgaggaggaggaagaggaggacggcgcagctggaaacaagggcactaataagagaaagaggaagaagtatcatcgtcacaccaccgatcagatcagacacatggaagcgctattcaaagagacaccacatccggacgagaagcaaagacagcagctgagcaagcaactagggctggcccctcgccaggtcaagttctggttccaaaaccgccgcacacagatcaaggctattcaagaacggcacgagaactccctgctcaaggcggaactagagaagctgcgagaggaaaacaaagccatgagggagtctttttccaaggctaattcctcctgccccaactgcggaggaggccccgatgatctccacctcgaaaactccaaactgaaagccgagctcgataagcttcgtgcagctcttggacgcactccctatcccctgcaggcttcatgctccgacgatcaagaacaccgtctcggctctctcgatttctacacgggcgtctttgccctcgagaagtcccgtattgccgagatttctaaccgagccacccttgaactccagaagatggccacctcaggcgaacctatgtggctccgcagcgttgagactggccgtgagattctcaactacgatgagtacctcaaggagtttccccaagcgcaagcctcttcgtttcctggaaggaaaaccatcgaagcatctagagatgcggggattgtgtttatggacgcacataaacttgcccagagtttcatggacgtgggacaatggaaagagacatttgcatgcttgatctcaaaggctgcaacggtcgatgttatccggcaaggcgaagggccttcacggatcgacggggctattcagctgatgttcggagagatgcagctgctcactccggtcgtccccacaagagaagtgtacttcgtgagaagctgccggcagctgagccctgagaaatgggcaatagtggacgtctcggtctccgtggaggacagcaacacggagaaggaggcttctcttctgaaatgtcgaaaactcccctccggttgcatcatcgaggacacctccaacggtcactccaaggtcacctgggtggagcacctcgacgtgtctgcatccacagttcagcctctcttccgctccttagtcaacaccggtttggcctttggggctcgacactgggtcgccacccttcagctccattgcgaacgccttgtcttcttcatggctaccaacgtccccaccaaagactctctcggagttacaactcttgccgggagaaagagtgtgctgaagatggctcagagaatgacacaaagcttctaccgcgccattgctgcatcaagctaccatcaatggaccaaaatcaccaccaaaactggacaagacatgcgggtttcttccaggaagaaccttcatgatcctggcgagcccacgggagtcattgtctgcgcttcttcttcgctgtggttacctgtttctccagctcttctcttcgatttctttagagatgaagctcgtcggcatgagtgggatgctttgtcaaacggagctcatgttcagtctattgcaaacttatccaagggacaagacagaggcaactcagtggcaatccagacagtgaaatcgagagaaaagagcatatgggtgctgcaagacagcagcactaactcgtatgagtcggtggtggtatacgctcccgtagatataaacacgacacagctggtgctcgcgggacatgatccaagcaacatccaaatcctcccctctggattctcaatcatacctgatggagtagagtcacggccactggtaataacgtctacacaagacgacagaaacagccaaggagggtcgctcctgacactcgccctccaaaccctcatcaacccttctcctgcagcaaagctgaatatggagtctgtggaatccgtgacaaacctcgtctcagtcacactacacaacattaagagaagtctacaaatcgaagattgctga

SEQ ID NO: 141 - protein, 776 aa, Arabidopsis thaliana
MKSIDGCQCCSWPCFKLLNSKKLARDRICMSMAVDMSSKQPTKDFFSSPALSLSLAGIFRNASSGSTNPEEDFLGRRVVDDEDRTVEMSSENSGPTRSRSEEDLEGEDHDDEEEEEEDGAAGNKGTNKRKRKKYHRHTTDQIRHMEALFKETPHPDEKQRQQLSKQLGLAPRQVKFWFQNRRTQIKAIQERHENSLLKAELEKLREENKAMRESFSKANSSCPNCGGGPDDLHLENSKLKAELDKLRAALGRTPYPLQASCSDDQEHRLGSLDFYTGVFALEKSRIAEISNRATLELQKMATSGEPMWLRSVETGREILNYDEYLKEFPQAQASSFPGRKTIEASRDAGIVFMDAHKLAQSFMDVGQWKETFACLISKAATVDVIRQGEGPSRIDGAIQLMFGEMQLLTPVVPTREVYFVRSCRQLSPEKWAIVDVSVSVEDSNTEKEASLLKCRKLPSGCIIEDTSNGHSKVTWVEHLDVSASTVQPLFRSLVNTGLAFGARHWVATLQLHCERLVFFMATNVPTKDSLGVTTLAGRKSVLKMAQRMTQSFYRAIAASSYHQWTKITTKTGQDMRVSSRKNLHDPGEPTGVIVCASSSLWLPVSPALLFDFFRDEARRHEWDALSNGAHVQSIANLSKGQDRGNSVAIQTVKSREKSIWVLQDSSTNSYESVVVYAPVDINTTQLVLAGHDPSNIQILPSGFSIIPDGVESRPLVITSTQDDRNSQGGSLLTLALQTLINPSPAAKLNMESVESVTNLVSVTLHNIKRSLQIEDC

SEQ ID NO: 142 - DNA, 2070 bp, Arabidopsis thaliana
atgagcagcgagaactcaggacccacgagatccagatcagaggaggatttggagggtgaggatcacgacgatgaggaggaggaagaggaggacggcgcagctggaaacaagggcactaataagagaaagaggaagaagtatcatcgtcacaccaccgatcagatcagacacatggaagcgctattcaaagagacaccacatccggacgagaagcaaagacagcagctgagcaagcaactagggctggcccctcgccaggtcaagttctggttccaaaaccgccgcacacagatcaaggctattcaagaacggcacgagaactccctgctcaaggcggaactagagaagctgcgagaggaaaacaaagccatgagggagtctttttccaaggctaattcctcctgccccaactgcggaggaggccccgatgatctccacctcgaaaactccaaactgaaagccgagctcgataagcttcgtgcagctcttggacgcactccctatcccctgcaggcttcatgctccgacgatcaagaacaccgtctcggctctctcgatttctacacgggcgtctttgccctcgagaagtcccgtattgccgagatttctaaccgagccacccttgaactccagaagatggccacctcaggcgaacctatgtggctccgcagcgttgagactggccgtgagattctcaactacgatgagtacctcaaggagtttccccaagcgcaagcctcttcgtttcctggaaggaaaaccatcgaagcatctagagatgcggggattgtgtttatggacgcacataaacttgcccagagtttcatggacgtgggacaatggaaagagacatttgcatgcttgatctcaaaggctgcaacggtcgatgttatccggcaaggcgaagggccttcacggatcgacggggctattcagctgatgttcggagagatgcagctgctcactccggtcgtccccacaagagaagtgtacttcgtgagaagctgccggcagctgagccctgagaaatgggcaatagtggacgtctcggtctccgtggaggacagcaacacggagaaggaggcttctcttctgaaatgtcgaaaactcccctccggttgcatcatcgaggacacctccaacggtcactccaaggtcacctgggtggagcacctcgacgtgtctgcatccacagttcagcctctcttccgctccttagtcaacaccggtttggcctttggggctcgacactgggtcgccacccttcagctccattgcgaacgccttgtcttcttcatggctaccaacgtccccaccaaagactctctcggagttacaactcttgccgggagaaagagtgtgctgaagatggctcagagaatgacacaaagcttctaccgcgccattgctgcatcaagctaccatcaatggaccaaaatcaccaccaaaactggacaagacatgcgggtttcttccaggaagaaccttcatgatcctggcgagcccacgggagtcattgtctgcgcttcttcttcgctgtggttacctgtttctccagctcttctcttcgatttctttagagatgaagctcgtcggcatgagtgggatgctttgtcaaacggagctcatgttcagtctattgcaaacttatccaagggacaagacagaggcaactcagtggcaatccagacagtgaaatcgagagaaaagagcatatgggtgctgcaagacagcagcactaactcgtatgagtcggtggtggtatacgctcccgtagatataaacacgacacagctggtgctcgcgggacatgatccaagcaacatccaaatcctcccctctggattctcaatcatacctgatggagtagagtcacggccactggtaataacgtctacacaagacgacagaaacagccaaggagggtcgctcctgacactcgccctccaaaccctcatcaacccttctcctgcagcaaagctgaatatggagtctgtggaatccgtgacaaacctcgtctcagtcacactacacaacattaagagaagtctacaaatcgaagattgctga

SEQ ID NO: 143 - protein, 689 aa, Arabidopsis thaliana
MSSENSGPTRSRSEEDLEGEDHDDEEEEEEDGAAGNKGTNKRKRKKYHRHTTDQIRHMEALFKETPHPDEKQRQQLSKQLGLAPRQVKFWFQNRRTQIKAIQERHENSLLKAELEKLREENKAMRESFSKANSSCPNCGGGPDDLHLENSKLKAELDKLRAALGRTPYPLQASCSDDQEHRLGSLDFYTGVFALEKSRIAEISNRATLELQKMATSGEPMWLRSVETGREILNYDEYLKEFPQAQASSFPGRKTIEASRDAGIVFMDAHKLAQSFMDVGQWKETFACLISKAATVDVIRQGEGPSRIDGAIQLMFGEMQLLTPVVPTREVYFVRSCRQLSPEKWAIVDVSVSVEDSNTEKEASLLKCRKLPSGCIIEDTSNGHSKVTWVEHLDVSASTVQPLFRSLVNTGLAFGARHWVATLQLHCERLVFFMATNVPTKDSLGVTTLAGRKSVLKMAQRMTQSFYRAIAASSYHQWTKITTKTGQDMRVSSRKNLHDPGEPTGVIVCASSSLWLPVSPALLFDFFRDEARRHEWDALSNGAHVQSIANLSKGQDRGNSVAIQTVKSREKSIWVLQDSSTNSYESVVVYAPVDINTTQLVLAGHDPSNIQILPSGFSIIPDGVESRPLVITSTQDDRNSQGGSLLTLALQTLINPSPAAKLNMESVESVTNLVSVTLHNIKRSLQIEDC

SEQ ID NO: 144 - DNA, 2244 bp, Arabidopsis thaliana
atgtcaatggccgtcgacatgtcttccaaacaacccaccaaagactttttctcctctccagccctctctctatctctcgctgggatattccggaatgcatcctccggcagcaccaaccctgaggaggatttcctgggcagaagagtagttgacgatgaggatcgcactgtggagatgagcagcgagaactcaggacccacgagatccagatcagaggaggatttggagggtgaggatcacgacgatgaggaggaggaagaggaggacggcgcagctggaaacaagggcactaataagagaaagaggaagaagtatcatcgtcacaccaccgatcagatcagacacatggaagcgctattcaaagagacaccacatccggacgagaagcaaagacagcagctgagcaagcaactagggctggcccctcgccaggtcaagttctggttccaaaaccgccgcacacagatcaaggctattcaagaacggcacgagaactccctgctcaaggcggaactagagaagctgcgagaggaaaacaaagccatgagggagtctttttccaaggctaattcctcctgccccaactgcggaggaggccccgatgatctccacctcgaaaactccaaactgaaagccgagctcgataagcttcgtgcagctcttggacgcactccctatcccctgcaggcttcatgctccgacgatcaagaacaccgtctcggctctctcgatttctacacgggcgtctttgccctcgagaagtcccgtattgccgagatttctaaccgagccacccttgaactccagaagatggccacctcaggcgaacctatgtggctccgcagcgttgagactggccgtgagattctcaactacgatgagtacctcaaggagtttccccaagcgcaagcctcttcgtttcctggaaggaaaaccatcgaagcatctagagatgcggggattgtgtttatggacgcacataaacttgcccagagtttcatggacgtgggacaatggaaagagacatttgcatgcttgatctcaaaggctgcaacggtcgatgttatccggcaaggcgaagggccttcacggatcgacggggctattcagctgatgttcggagagatgcagctgctcactccggtcgtccccacaagagaagtgtacttcgtgagaagctgccggcagctgagccctgagaaatgggcaatagtggacgtctcggtctccgtggaggacagcaacacggagaaggaggcttctcttctgaaatgtcgaaaactcccctccggttgcatcatcgaggacacctccaacggtcactccaaggtcacctgggtggagcacctcgacgtgtctgcatccacagttcagcctctcttccgctccttagtcaacaccggtttggcctttggggctcgacactgggtcgccacccttcagctccattgcgaacgccttgtcttcttcatggctaccaacgtccccaccaaagactctctcggagttacaactcttgccgggagaaagagtgtgctgaagatggctcagagaatgacacaaagcttctaccgcgccattgctgcatcaagctaccatcaatggaccaaaatcaccaccaaaactggacaagacatgcgggtttcttccaggaagaaccttcatgatcctggcgagcccacgggagtcattgtctgcgcttcttcttcgctgtggttacctgtttctccagctcttctcttcgatttctttagagatgaagctcgtcggcatgagtgggatgctttgtcaaacggagctcatgttcagtctattgcaaacttatccaagggacaagacagaggcaactcagtggcaatccagacagtgaaatcgagagaaaagagcatatgggtgctgcaagacagcagcactaactcgtatgagtcggtggtggtatacgctcccgtagatataaacacgacacagctggtgctcgcgggacatgatccaagcaacatccaaatcctcccctctggattctcaatcatacctgatggagtagagtcacggccactggtaataacgtctacacaagacgacagaaacagccaaggagggtcgctcctgacactcgccctccaaaccctcatcaacccttctcctgcagcaaagctgaatatggagtctgtggaatccgtgacaaacctcgtctcagtcacactacacaacattaagagaagtctacaaatcgaagattgctga

SEQ ID NO: 145 - protein, 747 aa, Arabidopsis thaliana
MSMAVDMSSKQPTKDFFSSPALSLSLAGIFRNASSGSTNPEEDFLGRRVVDDEDRTVEMSSENSGPTRSRSEEDLEGEDHDDEEEEEEDGAAGNKGTNKRKRKKYHRHTTDQIRHMEALFKETPHPDEKQRQQLSKQLGLAPRQVKFWFQNRRTQIKAIQERHENSLLKAELEKLREENKAMRESFSKANSSCPNCGGGPDDLHLENSKLKAELDKLRAALGRTPYPLQASCSDDQEHRLGSLDFYTGVFALEKSRIAEISNRATLELQKMATSGEPMWLRSVETGREILNYDEYLKEFPQAQASSFPGRKTIEASRDAGIVFMDAHKLAQSFMDVGQWKETFACLISKAATVDVIRQGEGPSRIDGAIQLMFGEMQLLTPVVPTREVYFVRSCRQLSPEKWAIVDVSVSVEDSNTEKEASLLKCRKLPSGCIIEDTSNGHSKVTWVEHLDVSASTVQPLFRSLVNTGLAFGARHWVATLQLHCERLVFFMATNVPTKDSLGVTTLAGRKSVLKMAQRMTQSFYRAIAASSYHQWTKITTKTGQDMRVSSRKNLHDPGEPTGVIVCASSSLWLPVSPALLFDFFRDEARRHEWDALSNGAHVQSIANLSKGQDRGNSVAIQTVKSREKSIWVLQDSSTNSYESVVVYAPVDINTTQLVLAGHDPSNIQILPSGFSIIPDGVESRPLVITSTQDDRNSQGGSLLTLALQTLINPSPAAKLNMESVESVTNLVSVTLHNIKRSLQIEDC

SEQ ID NO: 146 - DNA, 1893 bp, Arabidopsis thaliana
atgtcaatggccgtcgacatgtcttccaaacaacccaccaaagactttttctcctctccagccctctctctatctctcgctgggatattccggaatgcatcctccggcagcaccaaccctgaggaggatttcctgggcagaagagtagttgacgatgaggatcgcactgtggagatgagcagcgagaactcaggacccacgagatccagatcagaggaggatttggagggtgaggatcacgacgatgaggaggaggaagaggaggacggcgcagctggaaacaagggcactaataagagaaagaggaagaagtatcatcgtcacaccaccgatcagatcagacacatggaagcgctattcaaagagacaccacatccggacgagaagcaaagacagcagctgagcaagcaactagggctggcccctcgccaggtcaagttctggttccaaaaccgccgcacacagatcaaggctattcaagaacggcacgagaactccctgctcaaggcggaactagagaagctgcgagaggaaaacaaagccatgagggagtctttttccaaggctaattcctcctgccccaactgcggaggaggccccgatgatctccacctcgaaaactccaaactgaaagccgagctcgataagcttcgtgcagctcttggacgcactccctatcccctgcaggcttcatgctccgacgatcaagaacaccgtctcggctctctcgatttctacacgggcgtctttgccctcgagaagtcccgtattgccgagatttctaaccgagccacccttgaactccagaagatggccacctcaggcgaacctatgtggctccgcagcgttgagactggccgtgagattctcaactacgatgagtacctcaaggagtttccccaagcgcaagcctcttcgtttcctggaaggaaaaccatcgaagcatctagagatgcggggattgtgtttatggacgcacataaacttgcccagagtttcatggacgtgggacaatggaaagagacatttgcatgcttgatctcaaaggctgcaacggtcgatgttatccggcaaggcgaagggccttcacggatcgacggggctattcagctgatgttcggagagatgcagctgctcactccggtcgtccccacaagagaagtgtacttcgtgagaagctgccggcagctgagccctgagaaatgggcaatagtggacgtctcggtctccgtggaggacagcaacacggagaaggaggcttctcttctgaaatgtcgaaaactcccctccggttgcatcatcgaggacacctccaacggtcactccaaggtcacctgggtggagcacctcgacgtgtctgcatccacagttcagcctctcttccgctccttagtcaacaccggtttggcctttggggctcgacactgggtcgccacccttcagctccattgcgaacgccttgtcttcttcatggctaccaacgtccccaccaaagactctctcggagttacaactcttgccgggagaaagagtgtgctgaagatggctcagagaatgacacaaagcttctaccgcgccattgctgcatcaagctaccatcaatggaccaaaatcaccaccaaaactggacaagacatgcgggtttcttccaggaagaaccttcatgatcctggcgagcccacgggagtcattgtctgcgcttcttcttcgctgtggttacctgtttctccagctcttctcttcgatttctttagagatgaagctcgtcggcatgagtgggatgctttgtcaaacggagctcatgttcagtctattgcaaacttatccaagggacaagacagaggcaactcagtggcaatccaggtgcgtttattttgtcttctcctcctctaa

SEQ ID NO: 147 - protein, 630 aa, Arabidopsis thaliana
MSMAVDMSSKQPTKDFFSSPALSLSLAGIFRNASSGSTNPEEDFLGRRVVDDEDRTVEMSSENSGPTRSRSEEDLEGEDHDDEEEEEEDGAAGNKGTNKRKRKKYHRHTTDQIRHMEALFKETPHPDEKQRQQLSKQLGLAPRQVKFWFQNRRTQIKAIQERHENSLLKAELEKLREENKAMRESFSKANSSCPNCGGGPDDLHLENSKLKAELDKLRAALGRTPYPLQASCSDDQEHRLGSLDFYTGVFALEKSRIAEISNRATLELQKMATSGEPMWLRSVETGREILNYDEYLKEFPQAQASSFPGRKTIEASRDAGIVFMDAHKLAQSFMDVGQWKETFACLISKAATVDVIRQGEGPSRIDGAIQLMFGEMQLLTPVVPTREVYFVRSCRQLSPEKWAIVDVSVSVEDSNTEKEASLLKCRKLPSGCIIEDTSNGHSKVTWVEHLDVSASTVQPLFRSLVNTGLAFGARHWVATLQLHCERLVFFMATNVPTKDSLGVTTLAGRKSVLKMAQRMTQSFYRAIAASSYHQWTKITTKTGQDMRVSSRKNLHDPGEPTGVIVCASSSLWLPVSPALLFDFFRDEARRHEWDALSNGAHVQSIANLSKGQDRGNSVAIQVRLFCLLLL

SEQ ID NO: 148 - DNA, 1560 bp, Arabidopsis thaliana
atgtcaatggccgtcgacatgtcttccaaacaacccaccaaagactttttctcctctccagccctctctctatctctcgctgggatattccggaatgcatcctccggcagcaccaaccctgaggaggatttcctgggcagaagagtagttgacgatgaggatcgcactgtggagatgagcagcgagaactcaggacccacgagatccagatcagaggaggatttggagggtgaggatcacgacgatgaggaggaggaagaggaggacggcgcagctggaaacaagggcactaataagagaaagaggaagaagtatcatcgtcacaccaccgatcagatcagacacatggaagcgctattcaaagagacaccacatccggacgagaagcaaagacagcagctgagcaagcaactagggctggcccctcgccaggtcaagttctggttccaaaaccgccgcacacagatcaaggctattcaagaacggcacgagaactccctgctcaaggcggaactagagaagctgcgagaggaaaacaaagccatgagggagtctttttccaaggctaattcctcctgccccaactgcggaggaggccccgatgatctccacctcgaaaactccaaactgaaagccgagctcgataagcttcgtgcagctcttggacgcactccctatcccctgcaggcttcatgctccgacgatcaagaacaccgtctcggctctctcgatttctacacgggcgtctttgccctcgagaagtcccgtattgccgagatttctaaccgagccacccttgaactccagaagatggccacctcaggcgaacctatgtggctccgcagcgttgagactggccgtgagattctcaactacgatgagtacctcaaggagtttccccaagcgcaagcctcttcgtttcctggaaggaaaaccatcgaagcatctagagatgcggggattgtgtttatggacgcacataaacttgcccagagtttcatggacgtgggacaatggaaagagacatttgcatgcttgatctcaaaggctgcaacggtcgatgttatccggcaaggcgaagggccttcacggatcgacggggctattcagctgatgttcggagagatgcagctgctcactccggtcgtccccacaagagaagtgtacttcgtgagaagctgccggcagctgagccctgagaaatgggcaatagtggacgtctcggtctccgtggaggacagcaacacggagaaggaggcttctcttctgaaatgtcgaaaactcccctccggttgcatcatcgaggacacctccaacggtcactccaaggtcacctgggtggagcacctcgacgtgtctgcatccacagttcagcctctcttccgctccttagtcaacaccggtttggcctttggggctcgacactgggtcgccacccttcagctccattgcgaacgccttgtcttcttcatggctaccaacgtccccaccaaagactctctcggtccgtctatatatccggatcctccatttacactctctatctttctttatatataa

SEQ ID NO: 149 - protein, 519 aa, Arabidopsis thaliana
MSMAVDMSSKQPTKDFFSSPALSLSLAGIFRNASSGSTNPEEDFLGRRVVDDEDRTVEMSSENSGPTRSRSEEDLEGEDHDDEEEEEEDGAAGNKGTNKRKRKKYHRHTTDQIRHMEALFKETPHPDEKQRQQLSKQLGLAPRQVKFWFQNRRTQIKAIQERHENSLLKAELEKLREENKAMRESFSKANSSCPNCGGGPDDLHLENSKLKAELDKLRAALGRTPYPLQASCSDDQEHRLGSLDFYTGVFALEKSRIAEISNRATLELQKMATSGEPMWLRSVETGREILNYDEYLKEFPQAQASSFPGRKTIEASRDAGIVFMDAHKLAQSFMDVGQWKETFACLISKAATVDVIRQGEGPSRIDGAIQLMFGEMQLLTPVVPTREVYFVRSCRQLSPEKWAIVDVSVSVEDSNTEKEASLLKCRKLPSGCIIEDTSNGHSKVTWVEHLDVSASTVQPLFRSLVNTGLAFGARHWVATLQLHCERLVFFMATNVPTKDSLGPSIYPDPPFTLSIFLYI

SEQ ID NO: 150 - DNA, 2070 bp, Arabidopsis thaliana; identical to SEQ ID NO: 142

SEQ ID NO: 151 - protein, 689 aa, Arabidopsis thaliana; identical to SEQ ID NO: 143

SEQ ID NO: 152 - DNA, 1938 bp, Arabidopsis thaliana
atgggatatagggatgaagaaacaatggctaccggacaaaacagaacaactgtgccagagaatctgaagaaacacctcgcagtttcagttcgaaacattcaatggagttatggtatcttttggtctgtctctgcttctcagtctggagttttagaatggggagatggatactataatggagatatcaaaacgaggaagacgattcaagcttcggagatcaaagctgatcagcttggtctacggaggagcgagcagcttagcgagctttacgagtctctctccgtcgctgaatcttcttcttcaggcgttgctgccggatctcaagtcaccagacgagcttccgccgccgcactttcaccggaagatctcgccgacaccgagtggtactatttggtttgtatgtctttcgtcttcaacattggtgaaggaatgcctggacggacgtttgcaaacggtgaaccgatatggttgtgcaacgctcatacggcggatagtaaagtgtttagccgttctcttctagcaaaaagtgctgcggttaagacagtggtttgcttcccgttccttggaggagtcgttgagattggtaccacagaacatattacggaagacatgaatgtaatacaatgcgtgaagacatcattcctcgaagcccctgatccgtacgctacaatattaccagcaagatccgattatcacatcgacaacgttcttgatccgcaacagattctaggcgacgagatttacgcgcctatgttcagtacggagccttttccaacagcttctccgagcagaactaccaacggtttcgatcaagaacatgaacaagtagcagatgatcatgattctttcatgaccgaaagaatcactggaggagcttctcaggtgcaaagctggcagctcatggacgacgagcttagtaactgcgttcaccagtcgctaaattccagcgattgcgtctctcaaacgtttgttgaaggggcggctggacgggttgcttacggtgcaagaaagagtagagttcaaagactagggcaaattcaagagcaacagagaaatgtgaagacattgtcatttgatccaagaaacgacgacgttcattaccaaagtgtgatctcaacgatttttaagaccaaccatcagttaattctcggaccgcagtttcgaaactgcgataaacagtcaagcttcactaggtggaagaaatcatcgtcatcatcatcaggaaccgccacggtcacggcaccatcacaaggaatgttaaagaaaattattttcgatgttccgcgagtgcaccagaaagagaagttaatgttggactcaccagaagccagagatgaaactgggaaccatgcggttttagagaagaagcgccgcgagaaattgaacgaacggttcatgaccttgagaaaaatcattccgtcaatcaacaagatcgataaagtatcgattcttgacgatacgatagagtatcttcaagaactcgagagacgggttcaagaactagaatcttgcagagaatcaaccgatacagagactcgtgggacgatgacgatgaagaggaagaaaccatgcgacgcaggagaaagaacatcagctaattgcgcaaataatgaaacaggaaatgggaagaaggtgtcggttaacaatgttggtgaagccgagccagcagataccggttttactggtttaaccgataatttaaggatcggttcgtttggtaatgaggtggttattgagcttagatgtgcttggagagaaggagtattgcttgagataatggatgtgattagtgatctccatttggattctcattcggttcaatcctcgaccggagacggtttgctctgcttaaccgtcaattgcaagcacaaggggtcaaaaatagcgacaccaggaatgatcaaagaagcacttcaaagggttgcatggatctgttga

SEQ ID NO: 153 - protein, 637 aa, Arabidopsis thaliana
MATGQNRTTVPENLKKHLAVSVRNIQWSYGIFWSVSASQSGVLEWGDGYYNGDIKTRKTIQASEIKADQLGLRRSEQLSELYESLSVAESSSSGVAAGSQVTRRASAAALSPEDLADTEWYYLVCMSFVFNIGEGMPGRTFANGEPIWLCNAHTADSKVFSRSLLAKSAAVKTVVCFPFLGGVVEIGTTEHITEDMNVIQCVKTSFLEAPDPYATILPARSDYHIDNVLDPQQILGDEIYAPMFSTEPFPTASPSRTTNGFDQEHEQVADDHDSFMTERITGGASQVQSWQLMDDELSNCVHQSLNSSDCVSQTFVEGAAGRVAYGARKSRVQRLGQIQEQQRNVKTLSFDPRNDDVHYQSVISTIFKTNHQLILGPQFRNCDKQSSFTRWKKSSSSSSGTATVTAPSQGMLKKIIFDVPRVHQKEKLMLDSPEARDETGNHAVLEKKRREKLNERFMTLRKIIPSINKIDKVSILDDTIEYLQELERRVQELESCRESTDTETRGTMTMKRKKPCDAGERTSANCANNETGNGKKVSVNNVGEAEPADTGFTGLTDNLRIGSFGNEVVIELRCAWREGVLLEIMDVISDLHLDSHSVQSSTGDGLLCLTVNCKHKGSKIATPGMIKEALQRVAWIC

SEQ ID NO: 154 - DNA, 1929 bp, Arabidopsis thaliana
atggatgaagaaacaatggctaccggacaaaacagaacaactgtgccagagaatctgaagaaacacctcgcagtttcagttcgaaacattcaatggagttatggtatcttttggtctgtctctgcttctcagtctggagttttagaatggggagatggatactataatggagatatcaaaacgaggaagacgattcaagcttcggagatcaaagctgatcagcttggtctacggaggagcgagcagcttagcgagctttacgagtctctctccgtcgctgaatcttcttcttcaggcgttgctgccggatctcaagtcaccagacgagcttccgccgccgcactttcaccggaagatctcgccgacaccgagtggtactatttggtttgtatgtctttcgtcttcaacattggtgaaggaatgcctggacggacgtttgcaaacggtgaaccgatatggttgtgcaacgctcatacggcggatagtaaagtgtttagccgttctcttctagcaaaaagtgctgcggttaagacagtggtttgcttcccgttccttggaggagtcgttgagattggtaccacagaacatattacggaagacatgaatgtaatacaatgcgtgaagacatcattcctcgaagcccctgatccgtacgctacaatattaccagcaagatccgattatcacatcgacaacgttcttgatccgcaacagattctaggcgacgagatttacgcgcctatgttcagtacggagccttttccaacagcttctccgagcagaactaccaacggtttcgatcaagaacatgaacaagtagcagatgatcatgattctttcatgaccgaaagaatcactggaggagcttctcaggtgcaaagctggcagctcatggacgacgagcttagtaactgcgttcaccagtcgctaaattccagcgattgcgtctctcaaacgtttgttgaaggggcggctggacgggttgcttacggtgcaagaaagagtagagttcaaagactagggcaaattcaagagcaacagagaaatgtgaagacattgtcatttgatccaagaaacgacgacgttcattaccaaagtgtgatctcaacgatttttaagaccaaccatcagttaattctcggaccgcagtttcgaaactgcgataaacagtcaagcttcactaggtggaagaaatcatcgtcatcatcatcaggaaccgccacggtcacggcaccatcacaaggaatgttaaagaaaattattttcgatgttccgcgagtgcaccagaaagagaagttaatgttggactcaccagaagccagagatgaaactgggaaccatgcggttttagagaagaagcgccgcgagaaattgaacgaacggttcatgaccttgagaaaaatcattccgtcaatcaacaagatcgataaagtatcgattcttgacgatacgatagagtatcttcaagaactcgagagacgggttcaagaactagaatcttgcagagaatcaaccgatacagagactcgtgggacgatgacgatgaagaggaagaaaccatgcgacgcaggagaaagaacatcagctaattgcgcaaataatgaaacaggaaatgggaagaaggtgtcggttaacaatgttggtgaagccgagccagcagataccggttttactggtttaaccgataatttaaggatcggttcgtttggtaatgaggtggttattgagcttagatgtgcttggagagaaggagtattgcttgagataatggatgtgattagtgatctccatttggattctcattcggttcaatcctcgaccggagacggtttgctctgcttaaccgtcaattgcaagcacaaggggtcaaaaatagcgacaccaggaatgatcaaagaagcacttcaaagggttgcatggatctgttga

SEQ ID NO: 155 - protein, 642 aa, Arabidopsis thaliana
MDEETMATGQNRTTVPENLKKHLAVSVRNIQWSYGIFWSVSASQSGVLEWGDGYYNGDIKTRKTIQASEIKADQLGLRRSEQLSELYESLSVAESSSSGVAAGSQVTRRASAAALSPEDLADTEWYYLVCMSFVFNIGEGMPGRTFANGEPIWLCNAHTADSKVFSRSLLAKSAAVKTVVCFPFLGGVVEIGTTEHITEDMNVIQCVKTSFLEAPDPYATILPARSDYHIDNVLDPQQILGDEIYAPMFSTEPFPTASPSRTTNGFDQEHEQVADDHDSFMTERITGGASQVQSWQLMDDELSNCVHQSLNSSDCVSQTFVEGAAGRVAYGARKSRVQRLGQIQEQQRNVKTLSFDPRNDDVHYQSVISTIFKTNHQLILGPQFRNCDKQSSFTRWKKSSSSSSGTATVTAPSQGMLKKIIFDVPRVHQKEKLMLDSPEARDETGNHAVLEKKRREKLNERFMTLRKIIPSINKIDKVSILDDTIEYLQELERRVQELESCRESTDTETRGTMTMKRKKPCDAGERTSANCANNETGNGKKVSVNNVGEAEPADTGFTGLTDNLRIGSFGNEVVIELRCAWREGVLLEIMDVISDLHLDSHSVQSSTGDGLLCLTVNCKHKGSKIATPGMIKEALQRVAWIC

SEQ ID NO: 156 - DNA, 1914 bp, Arabidopsis thaliana
atggctaccggacaaaacagaacaactgtgccagagaatctgaagaaacacctcgcagtttcagttcgaaacattcaatggagttatggtatcttttggtctgtctctgcttctcagtctggagttttagaatggggagatggatactataatggagatatcaaaacgaggaagacgattcaagcttcggagatcaaagctgatcagcttggtctacggaggagcgagcagcttagcgagctttacgagtctctctccgtcgctgaatcttcttcttcaggcgttgctgccggatctcaagtcaccagacgagcttccgccgccgcactttcaccggaagatctcgccgacaccgagtggtactatttggtttgtatgtctttcgtcttcaacattggtgaaggaatgcctggacggacgtttgcaaacggtgaaccgatatggttgtgcaacgctcatacggcggatagtaaagtgtttagccgttctcttctagcaaaaagtgctgcggttaagacagtggtttgcttcccgttccttggaggagtcgttgagattggtaccacagaacatattacggaagacatgaatgtaatacaatgcgtgaagacatcattcctcgaagcccctgatccgtacgctacaatattaccagcaagatccgattatcacatcgacaacgttcttgatccgcaacagattctaggcgacgagatttacgcgcctatgttcagtacggagccttttccaacagcttctccgagcagaactaccaacggtttcgatcaagaacatgaacaagtagcagatgatcatgattctttcatgaccgaaagaatcactggaggagcttctcaggtgcaaagctggcagctcatggacgacgagcttagtaactgcgttcaccagtcgctaaattccagcgattgcgtctctcaaacgtttgttgaaggggcggctggacgggttgcttacggtgcaagaaagagtagagttcaaagactagggcaaattcaagagcaacagagaaatgtgaagacattgtcatttgatccaagaaacgacgacgttcattaccaaagtgtgatctcaacgatttttaagaccaaccatcagttaattctcggaccgcagtttcgaaactgcgataaacagtcaagcttcactaggtggaagaaatcatcgtcatcatcatcaggaaccgccacggtcacggcaccatcacaaggaatgttaaagaaaattattttcgatgttccgcgagtgcaccagaaagagaagttaatgttggactcaccagaagccagagatgaaactgggaaccatgcggttttagagaagaagcgccgcgagaaattgaacgaacggttcatgaccttgagaaaaatcattccgtcaatcaacaagatcgataaagtatcgattcttgacgatacgatagagtatcttcaagaactcgagagacgggttcaagaactagaatcttgcagagaatcaaccgatacagagactcgtgggacgatgacgatgaagaggaagaaaccatgcgacgcaggagaaagaacatcagctaattgcgcaaataatgaaacaggaaatgggaagaaggtgtcggttaacaatgttggtgaagccgagccagcagataccggttttactggtttaaccgataatttaaggatcggttcgtttggtaatgaggtggttattgagcttagatgtgcttggagagaaggagtattgcttgagataatggatgtgattagtgatctccatttggattctcattcggttcaatcctcgaccggagacggtttgctctgcttaaccgtcaattgcaagcacaaggggtcaaaaatagcgacaccaggaatgatcaaagaagcacttcaaagggttgcatggatctgttga

SEQ ID NO: 157 - protein, 637 aa, Arabidopsis thaliana; identical to SEQ ID NO: 153

SEQ ID NO: 158 - DNA, 618 bp, Solanum lycopersicum
atggagaagattggaagagaagctgttgattacatgaatatgaagtctttctctcaaccccttagaaaaaaatccattagactttttggtaaagaatttagtgttggtgatagtactaacatgtctgaatcaactgataaaaatcctttgcatcatgaacctaaaccaaatacgatgagtatctccgcgaatcgtatcgataaaacaggtcatgttgatgaaatcagcaggaaatatgaatgttactattgttttaggagctttccaacttctcaagctttaggaggccatcaaaatgcacacaagaaagaaagacaaaatgccaaactatctcatcttcagtcttcaatagtgcatgagacgaaccgtaatagatttggtgaaccatccactgcagctacaagattaactcattatcattcaacatggagcaacattaacaataataatgtttatagtcctaattacaatgaagcattttggcaaattcctccaacaattcatcattatcagaataatattaatcctccatcttctttttctcatgactcattttttcctaatgatgaagagaagagggaagtacaaaatcatgtgagtttagatttgcacttataa

SEQ ID NO: 159 - protein, 205 aa, Solanum lycopersicum
MEKIGREAVDYMNMKSFSQPLRKKSIRLFGKEFSVGDSTNMSESTDKNPLHHEPKPNTMSISANRIDKTGHVDEISRKYECYYCFRSFPTSQALGGHQNAHKKERQNAKLSHLQSSIVHETNRNRFGEPSTAATRLTHYHSTWSNINNNNVYSPNYNEAFWQIPPTIHHYQNNINPPSSFSHDSFFPNDEEKREVQNHVSLDLHL

SEQ ID NO: 160 - DNA, 1257 bp, Oxalobacter formigenes
atgaataatccacaaacaggacaatcaacaggcctcttgggcaatcgttggttctacttggtattagcagttttgctgatgtgtatgatctcgggtgtccaatattcctggacactgtacgctaacccggttaaagacaaccttggcgtttctttggctgcggttcagacggctttcacactctctcaggtcattcaagctggttctcagcctggtggtggttacttcgttgataaattcggtccaagaattccattgatgttcggtggtgcgatggttctcgctggctggaccttcatgggtatggttgacagtgttcctgctctgtatgctctttatactctggccggtgcaggtgttggtatcgtttacggtatcgcgatgaacacggctaacagatggttcccggacaaacgcggtctggcttccggtttcaccgctgccggttacggtctgggtgttctgccgttcctgccactgatcagctccgttctgaaagttgaaggtgttggcgcagcattcatgtacaccggtttgatcatgggtatcctgattatcctgatcgctttcgttatccgtttccctggccagcaaggcgccaaaaaacaaatcgttgttaccgacaaggatttcaattctggcgaaatgctgagaacaccacaattctgggttctgtggaccgcattcttttccgttaactttggtggtttgctgctggttgccaacagcgtcccttacggtcgcagcctcggtcttgccgcaggtgtgctgacgatcggtgtttcgatccagaacctgttcaatggtggttgccgtcctttctggggtttcgtttccgataaaatcggccgttacaaaaccatgtccgtcgttttcggtatcaatgctgttgttctcgcacttttcccgacgattgctgccttgggcgatgtagcctttatcgccatgttggcaatcgcattcttcacatggggtggtagctacgctctgttcccatcgaccaacagcgatattttcggtacggcatactctgccagaaactatggtttcttctgggctgcaaaagcaactgcctcgatcttcggtggtggtctgggtgctgcaattgcaaccaacttcggatggaataccgctttcctgattactgcgattacttctttcatcgcatttgctctggctaccttcgttattccaagaatgggccgtccagtcaagaaaatggtcaaattgtctccagaagaaaaagctgtacattaa

SEQ ID NO: 161 - protein, 418 aa, Oxalobacter formigenes
MNNPQTGQSTGLLGNRWFYLVLAVLLMCMISGVQYSWTLYANPVKDNLGVSLAAVQTAFTLSQVIQAGSQPGGGYFVDKFGPRIPLMFGGAMVLAGWTFMGMVDSVPALYALYTLAGAGVGIVYGIAMNTANRWFPDKRGLASGFTAAGYGLGVLPFLPLISSVLKVEGVGAAFMYTGLIMGILIILIAFVIRFPGQQGAKKQIVVTDKDFNSGEMLRTPQFWVLWTAFFSVNFGGLLLVANSVPYGRSLGLAAGVLTIGVSIQNLFNGGCRPFWGFVSDKIGRYKTMSVVFGINAVVLALFPTIAALGDVAFIAMLAIAFFTWGGSYALFPSTNSDIFGTAYSARNYGFFWAAKATASIFGGGLGAAIATNFGWNTAFLITAITSFIAFALATFVIPRMGRPVKKMVKLSPEEKAVH

SEQ ID NO: 162 - DNA, 1278 bp, Methylobacterium sp.
atggaacgccaggattcgccgtcggcgaaatggtggcagctcgccttcggcgtgatctgcatggccatgatcgccaacctccaatacggttggacgttgttcgtggacccgatcgaccagcgctaccactggggacgcgcggcgatccagctcgccttcacgctgttcgtcgccaccgagacctggctggtcccggtcgaggcgtggttcgtcgaccgctacggcccgaagatcgtggtcgcgttcggcggcgtgatgatcgccctcgcctggacgatcaacgcctacgccgacagcctggcgatgctctatctcggcgccgtcatcgccggcatcggtgcgggctcggtctacggcacctgcgtgggcaacgcgctcaagtggttcccgcatcgccgcggcctcgccgccggtgccaccgcggccggcttcggcgcgggtgccgccatcacggtggtaccgatcgcccgcatgatcgcgtcgagcggttaccaggacgccttcctgtatttcggcatcggtcagggcgccgtggtcctcgcgctcgccttcctgctgcgcaagccgtcgaccaactcgccggtccagcgcaagagcacccgcctgccgcagaccaaggtcgaccgcagcccccgcgaggcggtgcgcaccccggtcttctgggtgatgtacgccatgttcgtgatggtcgcctccggcggcctgatggcggcggcgcagatcgccccgatcgcccacgacttccaggtggcgggcgtgccggtgagcctgttcggcctccagatggcggcgctgacgcttgcgatctcgctcgaccggatcttcgacgggttcgggcggccgttcttcggctacgtctccgacaacatcggccgcgagaacacgatgttcatcgccttctcgacggcggcgctggcggtgatcgtgctgctgacctacggtcacatcccgatggtcttcgtgctggccaccgcggtgtatttcggggtgttcggcgagatctactcgctgttcccggcgacctgcggcgacacgttcggctccaagtacgccgccagcaatgccggcctgctctacaccgccaagggcaccgcggcgttcctcgtgcccttcgccagcctcctgtcggcggcctacggctggtcggcggtgttcacgctgatcatcgtgctcaacgtgacggcggcggcgatggcgatgttcgtcctgcgcccgatgcgggcccgctacctcgccgcggaggagcatcccgcggcgctcagcgcccatccgatctaa

SEQ ID NO: 163 - protein, 428 aa, Methylobacterium sp.
MERQDSPSAKWWQLAFGVICMAMIANLQYGWTLFVDPIDQRYHWGRAAIQLAFTLFVATETWLVPVEAWFVDRYGPKIVVAFGGVMIALAWTINAYADSLAMLYLGAVIAGIGAGSVYGTCVGNALKWFPHRRGLAAGATAAGFGAGAAITVVPIARMIASSGYQDAFLYFGIGQGAVVLALAFLLRKPSTNSPVQRKSTRLPQTKVDRSPREAVRTPVFWVMYAMFVMVASGGLMAAAQIAPIAHDFQVAGVPVSLFGLQMAALTLAISLDRIFDGFGRPFFGYVSDNIGRENTMFIAFSTAALAVIVLLTYGHIPMVFVLATAVYFGVFGEIYSLFPATCGDTFGSKYAASNAGLLYTAKGTAAFLVPFASLLSAAYGWSAVFTLIIVLNVTAAAMAMFVLRPMRARYLAAEEHPAALSAHPIRAA

SEQ ID NO: 164 - DNA, 1278 bp, Methylobacterium sp.
atgtccgagatcgtcaaaccggcggggcgtggccgatggctgcaactcgccttcggcgtggtctgcatgtgcatgatcgccaacatgcagtacggttggaccttcttcgtgaacccgatgcaggagcggcacggctgggatcgcgcggcgatccaggtggcgttcacgctgttcgtcgtcaccgagacgtggctggtcccgatcgagggctggtttgtcgacaagtatggcccgcggatcgtcacgctgttcggcggcctgctctgcggcatcgcctgggtgatcaactcctacgccgactcgctcaccgtcctgtacatcgcggccgcgatcggcggcaccggcgccggtgcggtctacggaacctgcgtcggcaattcgctgaagtggtttcccgaccgacgcggcctcgccgcgggcatcaccgcgatgggcttcggcgcgggctcggccctgaccgtcgtgccgatccaggccatgatcaagtcgcagggctacgaggcggcgttcttctacttcggtatcgggcagggcgtcatcgtgatgctcatcgccctgttcctgcggtcgcccgcgaaggggcaggttccggagatcgcccgggtcagccagtcgaagcgcgactacaagccctccgagatggtccgcacgccgatcttctgggtcatgtacgcgatgttcgtcatgatggcggccggcggcctgatggcgaccgcgcagctcggcccgatcgccaaggacttcaagatcgccgacgttccggtctcgctgctcgggatcacgctgccggcgctgaccttcgcggccacgctcgaccgggtgctcaacggcgtgacgcgtccgttcttcggctgggtctccgaccatatcggccgcgagaacacgatgttcctgtccttcgcgatcgaaggcctgggcatctacgcgctcagccagttcggccagaacccgatcgccttcgtgcttctgaccggtctcgtgttctttgcctggggtgagatctactccctgttcccggcgacctgcggagacacgttcggctcgaaatacgccgccaccaatgccggtctgctctatacggccaagggcacggcggcgctgatcgtcccctataccagcgtgctcacgaccatgaccgggagctggcacgcggtgttcctggcggcagcggccctcaacatcgtcgcggctctgctggcgctcttcgtcctgaagccgatgcgggccgcctataccaagaagcgcgaagcgagcctcgcgccggtcctggcccagtaa

SEQ ID NO: 165 - protein, 425 aa, Methylobacterium sp.
MSEIVKPAGRGRWLQLAFGVVCMCMIANMQYGWTFFVNPMQERHGWDRAAIQVAFTLFVVTETWLVPIEGWFVDKYGPRIVTLFGGLLCGIAWVINSYADSLTVLYIAAAIGGTGAGAVYGTCVGNSLKWFPDRRGLAAGITAMGFGAGSALTVVPIQAMIKSQGYEAAFFYFGIGQGVIVMLIALFLRSPAKGQVPEIARVSQSKRDYKPSEMVRTPIFWVMYAMFVMMAAGGLMATAQLGPIAKDFKIADVPVSLLGITLPALTFAATLDRVLNGVTRPFFGWVSDHIGRENTMFLSFAIEGLGIYALSQFGQNPIAFVLLTGLVFFAWGEIYSLFPATCGDTFGSKYAATNAGLLYTAKGTAALIVPYTSVLTTMTGSWHAVFLAAAALNIVAALLALFVLKPMRAAYTKKREASLAPVLAQ

SEQ ID NO: 166 - DNA, 1362 bp, Pseudomonas putida
atgaagattgccagcgtgctcgcactgcctttgagtggatatgctttcagtgtgcatgctacacaggttttcgacctggaaggttatggagcgatctctcgtgccatgggtggcaccagttcatcgtattataccggtaatgctgcgctgattagtaatcccgctacattgagttttgctccggacggaaatcagtttgagctcgggctggacgtggtgactaccgatatcaaggttcacgacagccacggagcagaggcaaaaagcagcacgagatccaataatcgaggcccctatgtgggtccacaattgagctatgttgctcagttggatgactggcgtttcggtgctggattgtttgtcagtagcgggttgggtacagagtatggaagtaaaagttttctatcacagacagaaaacggaatccagaccagctttgataattccagccgtctgatcgtattgcgcgctcctattggctttagttatcaagccacatcaaagctcaccttcggcgctagtgtcgatctggtctggacttcactcaaccttgaacttctacttccatcatctcaggtgggagccctgactgcgcaggggaatctttcaggcggtttagttccctcgctggctggattcgtcgggacaggtggtgccgcccatttcagtctaagtcgcaacagtaccgctggtggcgccgtggatgcggtcggttggggcgggcgcttgggacttacctacaaactcacggataacactgtcctaggtgcgatgtacaacttcaagacttcggtgggcgatctcgaggggaaggcgacactttctgctatcagtggtgatggagcggtgcttccattggatggcgatatccgtgtaaaaaactttgagatgcccgccagtctgacgcttggcctcgctcatcagttcaatgagcgttgggtagttgctgctgatatcaagcgtgcctactggggtgatgtaatggatagcatgaatgtggctttcatctcgcagttgggcgggatcgatgtcgcattgccacaccgctatcaggatataacggtggcctcaatcggcactgcttacaaatataacaatgatttaacgcttcgtgctggatatagctatgcacaacaggcgctagacagcgaactgatattgccagtgattcctgcttatttgaagcggcacgttactttcggtggcgagtatgactttgacaaggactccaggatcaatttggcaatttcttttggcctgagagagcgcgtgcagacgccatcgtacttggcaggcaccgagatgttgcggcaaagccacagtcaaataaatgcagtggtttcctatagcaaaaatttttaa

SEQ ID NO: 167 - protein, 453 aa, Pseudomonas putida
MKIASVLALPLSGYAFSVHATQVFDLEGYGAISRAMGGTSSSYYTGNAALISNPATLSFAPDGNQFELGLDVVTTDIKVHDSHGAEAKSSTRSNNRGPYVGPQLSYVAQLDDWRFGAGLFVSSGLGTEYGSKSFLSQTENGIQTSFDNSSRLIVLRAPIGFSYQATSKLTFGASVDLVWTSLNLELLLPSSQVGALTAQGNLSGGLVPSLAGFVGTGGAAHFSLSRNSTAGGAVDAVGWGGRLGLTYKLTDNTVLGAMYNFKTSVGDLEGKATLSAISGDGAVLPLDGDIRVKNFEMPASLTLGLAHQFNERWVVAADIKRAYWGDVMDSMNVAFISQLGGIDVALPHRYQDITVASIGTAYKYNNDLTLRAGYSYAQQALDSELILPVIPAYLKRHVTFGGEYDFDKDSRINLAISFGLRERVQTPSYLAGTEMLRQSHSQINAVVSYSKNF

SEQ ID NO: 168 - DNA, 1383 bp, Pseudomonas putida
atgaaaaaaacaatatacagcttaagtgcctgcggcattttgacgtgcttgtactgtggtattgcgtctgcaacagatgctttcaacctcgtcggggttggaccggtttcccaaggtatgggggggattggtgcagccttcaatatcggggcacaaggtatgatgctgaacccggcaacgcttactcagatgcaagaaggtatgcatctggggctgggaatggacatcattactgcggaattggaagtcaagaataccgctaccggcgaaaaagccgactcccatagtcgtgggcgcaacaacgggccttacgtggcgcctgagctttctttggtgtggcgtggtgagcgatatgcgctgggagtcggtgcttttgcttccgatggggttggaacccagtttggagacaccagctttctctcgcgtaccacgaccaataatcttaatacagggctggaaaactactcccgtctgatagttttgcggataccgttctctgcggcttaccaggtgaacgagaagttgtccgtcggggcatcgttggatgctgtgtggacgtcggtgaacttgggactcctactggataccacacagattggtacattggttggacaaggccaggtgtccggctcattgatgccagcgttgctgagcgtgccggagctgtcggcaggttatctatccgcggacaatcaccgtgccagcggtggtggcgtggactcctggggcataggtggccggcttggtctgacctatcagttgaccccaaaaacacgggtggggattgtatacaacttcaagacccatgttggagacctgtctggcaatgccgatttgacggcagtaagcgctgtcgcgggtaatatccctctctcgggtgaactcaagctacataacttcgagatgccagcatctctcgttgcgggcatcagtcacgaattcagtgatcagtttgctgttgcgttcgactacaagcgtgtctactggagcgatgtcatggatgacatagaagtcaacttcaagcagaaagccacgggcgacactatcaatctgaaactgcctttcaattatcgggacaccaacgtgtattcgttgggagcgcaataccgctacggtgcgaactgggtgtttcgagcgggcgtgcactatgcccaactggccaacccttcaagtggtacaatgccaatcattccttcgacaccgactaccagtctctcgggaggcttttcatatgccttcagccctgaggatgtagtcgatttttctctggcctacggattcaagaagaaagtatccaatgacagcctgccgatcaccgacaagcccatcgaagtatcgcattcgcagatagttacatcgatttcctataccaagagtttctag

SEQ ID NO: 169 - protein, 460 aa, Pseudomonas putida
MKKTIYSLSACGILTCLYCGIASATDAFNLVGVGPVSQGMGGIGAAFNIGAQGMMLNPATLTQMQEGMHLGLGMDIITAELEVKNTATGEKADSHSRGRNNGPYVAPELSLVWRGERYALGVGAFASDGVGTQFGDTSFLSRTTTNNLNTGLENYSRLIVLRIPFSAAYQVNEKLSVGASLDAVWTSVNLGLLLDTTQIGTLVGQGQVSGSLMPALLSVPELSAGYLSADNHRASGGGVDSWGIGGRLGLTYQLTPKTRVGIVYNFKTHVGDLSGNADLTAVSAVAGNIPLSGELKLHNFEMPASLVAGISHEFSDQFAVAFDYKRVYWSDVMDDIEVNFKQKATGDTINLKLPFNYRDTNVYSLGAQYRYGANWVFRAGVHYAQLANPSSGTMPIIPSTPTTSLSGGFSYAFSPEDVVDFSLAYGFKKKVSNDSLPITDKPIEVSHSQIVTSISYTKSF

SEQ ID NO: 170 - DNA, 1218 bp, Pyrococcus horikoshii
atgatccttcaggttgctttggatctaacggacatcgaacaggctatatcaatagcagagaaagcagccaggggtggcgcgcattggcttgaggttggaactccgctaatcaagaaggaaggtatgcgtgcggtcgagttattgaaaagacgtttccctgacaggaagattgttgcagatctcaaaaccatggacaccggggcgcttgaagttgagatggccgctagacacggggcggacgtcgtttcgattttgggcgttgctgatgataagaccatcaaggacgctttagcagttgccaggaaatacggtgtgaaaatcatggtggatttgatcggagtaaaagacaaggtgcagagagcaaaagagttagaacaaatgggagttcattacatacttgtacatacgggaatcgacgaacaagcacaggggaaaactcctcttgaagatctagagaaggtggtcaaggccgtaaagattccagtggcagtggccggtggattaaatctggaaacaatccccaaggttatagaactcggcgcgactatagtgattgtgggcagtgcaatcactaagagcaaagacccagagggagtgacgaggaagattatcgacttattttgggatgagtacatgaaaacgatccgaaaagcgatgaaggatataactgatcacataaacgaagttgcagacaagctcagactcgacgaggtgagaggtctagtggatgcaatgataggcgcaaataaaatcttcatctacggcgccggtcggtctggccttgtgggaaaggcttttgcgatgagattaatgcatcttgacttcaatgtgtatgtcgtgggcgagacaataaccccggccttcgaagagggcgaccttctcattgctatctccggtagtggagaaacaaagacaatcgtcgacgccgcggagatagcaaaacaacagggcggtaaagtcgttgccataacgagttacaaagactcgactttgggcagactggccgatgtagttgtagaaattccagggagaactaaaacggacgtcccgacagattatattgcgaggcaaatgttaactaagtacaaatggacagcgcccatggggaccctatttgaagattcaactatgatctttcttgacgggattatagcgctattaatggcgacttttcagaaaactgagaaagacatgaggaagaagcacgcaactctagag

SEQ ID NO: 171 - protein, 406 aa, Pyrococcus horikoshii
MILQVALDLTDIEQAISIAEKAARGGAHWLEVGTPLIKKEGMRAVELLKRRFPDRKIVADLKTMDTGALEVEMAARHGADVVSILGVADDKTIKDALAVARKYGVKIMVDLIGVKDKVQRAKELEQMGVHYILVHTGIDEQAQGKTPLEDLEKVVKAVKIPVAVAGGLNLETIPKVIELGATIVIVGSAITKSKDPEGVTRKIIDLFWDEYMKTIRKAMKDITDHINEVADKLRLDEVRGLVDAMIGANKIFIYGAGRSGLVGKAFAMRLMHLDFNVYVVGETITPAFEEGDLLIAISGSGETKTIVDAAEIAKQQGGKVVAITSYKDSTLGRLADVVVEIPGRTKTDVPTDYIARQMLTKYKWTAPMGTLFEDSTMIFLDGIIALLMATFQKTEKDMRKKHATLE

SEQ ID NO: 172 - DNA, 1221 bp, Artificial Sequence
  Synthetic 3-hexulose-6-phosphate formaldehyde lyase (HPS-synthetic) Nucleic Acid Coding Sequence
atgaagctccaagtcgccatcgacctgctgtccaccgaagccgccctcgagctggccggcaaggttgccgagtacgtcgacatcatcgaactgggcacccccctgatcaaggccgagggcctgtcggtcatcaccgccgtcaagaaggctcacccggacaagatcgtcttcgccgacatgaagaccatggacgccggcgagctcgaagccgacatcgcgttcaaggccggcgctgacctggtcacggtcctcggctcggccgacgactccaccatcgcgggtgccgtcaaggccgcccaggctcacaacaagggcgtcgtcgtcgacctgatcggcatcgaggacaaggccacccgtgcacaggaagttcgcgccctgggtgccaagttcgtcgagatgcacgctggtctggacgagcaggccaagcccggcttcgacctgaacggtctgctcgccgccggcgagaaggctcgcgttccgttctccgtggccggtggcgtgaaggttgcgaccatccccgcagtccagaaggccggcgcagaggttgccgtcgccggtggcgccatctacggtgcagccgacccggccgccgccgcgaaggaactgcgcgccgcgatcgccatgacgcaagccgcagaagccgacggggccgtgaaggtcgtcggagacgacatcaccaacaacctttcccttgttcgggacgaggtcgcggacaccgcggcgaaagtcgacccggagcaggtggctgtcctcgctcgccaaatcgtccagcctggacgggttttcgtggcgggcgccggtcgcagcgggctcgtcctgcgcatggccgccatgcggctgatgcacttcggcctcaccgtgcacgtcgcgggcgacaccaccaccccggcaatctcagccggcgatctgctgctggtggcttccggctcgggcaccacctccggtgtggtcaagtccgccgagacggccaagaaggccggggcgcgcatcgccgccttcaccaccaacccggattctccgctggccggtctggccgacgccgtggtgatcatccccgccgcgcagaagaccgatcacggctcgcacatttcgcggcagtacgccggatcccttttcgagcaggtgctgttcgtcgtcaccgaagccgtgttccagtcgctgtgggatcacaccgaggtcgaggccgaggaactctggacgcgccacgccaacctcgagtga

SEQ ID NO: 173 - protein, 406 aa, Artificial Sequence
  Synthetic 3-hexulose-6-phosphate formaldehyde lyase (HPS-synthetic) Amino Acid Sequence
MKLQVAIDLLSTEAALELAGKVAEYVDIIELGTPLIKAEGLSVITAVKKAHPDKIVFADMKTMDAGELEADIAFKAGADLVTVLGSADDSTIAGAVKAAQAHNKGVVVDLIGIEDKATRAQEVRALGAKFVEMHAGLDEQAKPGFDLNGLLAAGEKARVPFSVAGGVKVATIPAVQKAGAEVAVAGGAIYGAADPAAAAKELRAAIAMTQAAEADGAVKVVGDDITNNLSLVRDEVADTAAKVDPEQVAVLARQIVQPGRVFVAGAGRSGLVLRMAAMRLMHFGLTVHVAGDTTTPAISAGDLLLVASGSGTTSGVVKSAETAKKAGARIAAFTTNPDSPLAGLADAVVIIPAAQKTDHGSHISRQYAGSLFEQVLFVVTEAVFQSLWDHTEVEAEELWTRHANLE

SEQ ID NO: 174 - DNA, 621 bp, Mycobacterium gastri
atgaaactacaagttgcgatagatctcttgtctacagaagcagctttggaattggccggtaaagtggctgagtacgtggacatcatagaattgggtacgcccctgatagaagcagagggtctttcggtaattacagccgttaaaaaggcacatcccgacaagattgttttcgccgatatgaaaaccatggatgcaggtgaactcgaggcagacattgcatttaaagctggtgcagacctcgtgactgttcttgggagcgccgacgattctacaattgcaggcgcagttaaagcagcccaagcccacaacaaaggcgtcgtggttgatctgatcggcatcgaggacaaagcgaccagagcccaagaagtgagagcattgggcgccaagtttgttgagatgcacgcaggcctcgatgaacaagccaagcccggcttcgacttgaacggtttgttagcagccggcgagaaagcacgcgttccttttagtgtagcaggtggcgttaaggtcgctacgatccctgctgtccaaaaagctggtgcggaagtggcagttgcgggcggtgccatctatggggcagctgatcccgcggccgctgccaaagagcttagagcagctatagcc

SEQ ID NO: 175 - protein, 207 aa, Mycobacterium gastri
MKLQVAIDLLSTEAALELAGKVAEYVDIIELGTPLIEAEGLSVITAVKKAHPDKIVFADMKTMDAGELEADIAFKAGADLVTVLGSADDSTIAGAVKAAQAHNKGVVVDLIGIEDKATRAQEVRALGAKFVEMHAGLDEQAKPGFDLNGLLAAGEKARVPFSVAGGVKVATIPAVQKAGAEVAVAGGAIYGAADPAAAAKELRAAIA

SEQ ID NO: 176 - DNA, 633 bp, Bacillus methanolicus
atggaactacagttggcattagacttagtcaacattgaagaggcaaagcaagtggttgcggaagtccaagagtatgtggatattgtggagattggaactccagtaataaagatatggggtttgcaagcagtcaaagctgttaaggatgcgttcccacatctgcaagttttggccgatatgaaaacgatggatgcagccgcatacgaagtagctaaagcggccgagcacggagctgacatcgttacgattcttgcagcggccgaggacgtgtctatcaaaggtgcagttgaagaggcgaaaaagttaggaaagaaaatactggtggacatgattgccgttaaaaatttagaggaaagagccaagcaggtagatgagatgggggtcgactatatatgtgtacatgcagggtatgacttgcaggctgttggaaaaaatcccttagatgacctaaagaggataaaagccgtggttaagaacgctaaaactgcgatcgcagggggaatcaaactcgaaacgttacccgaggttatcaaagcagaaccagatctagtgattgtgggagggggcattgcaaaccaaacagacaagaaagctgcagctgaaaagattaataaacttgtgaaacagggcctt

SEQ ID NO: 177 - protein, 211 aa, Bacillus methanolicus
MELQLALDLVNIEEAKQVVAEVQEYVDIVEIGTPVIKIWGLQAVKAVKDAFPHLQVLADMKTMDAAAYEVAKAAEHGADIVTILAAAEDVSIKGAVEEAKKLGKKILVDMIAVKNLEERAKQVDEMGVDYICVHAGYDLQAVGKNPLDDLKRIKAVVKNAKTAIAGGIKLETLPEVIKAEPDLVIVGGGIANQTDKKAAAEKINKLVKQGL

SEQ ID NO: 178 - DNA, 564 bp, Bacillus methanolicus
atgatttccatgcttaccactgaatttctggcagaaatagtgaaagagttgaacagtagcgtaaatcaaatcgcagacgaagaggctgaagcgctggttaacggcatattgcaatcgaagaaagtgttcgtggcgggagctggtcgttccgggttcatggcgaagtcattcgccatgaggatgatgcacatggggatcgatgcttatgtggtcggagagacagtgacaccaaattatgagaaagaggatatccttataattgggtcagggtcaggggaaaccaaaagtttggtttcaatggctcagaaagcgaaaagcatcgggggcacaattgcagcggtgacaattaatcctgagtctaccatcggtcaattggctgatatagtaataaaaatgcccggatctccaaaagacaaatctgaagccagggaaacaatccaaccaatgggatctcttttcgagcaaactcttttgctcttttacgacgccgtaatacttagatttatggaaaagaaaggacttgacaccaaaacaatgtacggtaggcacgcaaatttggagtga

SEQ ID NO: 179 - protein, 187 aa, Bacillus methanolicus
MISMLTTEFLAEIVKELNSSVNQIADEEAEALVNGILQSKKVFVAGAGRSGFMAKSFAMRMMHMGIDAYVVGETVTPNYEKEDILIIGSGSGETKSLVSMAQKAKSIGGTIAAVTINPESTIGQLADIVIKMPGSPKDKSEARETIQPMGSLFEQTLLLFYDAVILRFMEKKGLDTKTMYGRHANLE

SEQ ID NO: 180 - DNA, 600 bp, Mycobacterium gastri
atgacccaagcggcagaagcagacggcgcggtcaaagtagttggcgatgacataactaacaatctgagcctagtaagggatgaagtcgccgatacagcagccaaggtggacccagaacaagtggctgtcctcgcaaggcagatcgtgcagcctggtagggtgtttgtggctggcgcaggacgaagcggactggttctgcggatggctgccatgagacttatgcattttggactgaccgtgcatgtggccggggatacgactacgcctgccatttctgcaggggacttgcttttagtcgctagtgggtcagggaccacatctggagtggttaaaagtgctgagacagctaagaaagcaggggcaagaatcgcagcctttacaactaatccagatagtccgctcgccggacttgcagatgccgtggttatcatacctgctgcgcagaaaacggatcatgggtcgcatatatcacggcaatatgctggcagtctctttgagcaggttctctttgtggttaccgaggccgtctttcaatcactctgggaccacactgaagtcgaagctgaggaactatggacacggcacgctaatctagaatag

SEQ ID NO: 181 - protein, 199 aa, Mycobacterium gastri
MTQAAEADGAVKVVGDDITNNLSLVRDEVADTAAKVDPEQVAVLARQIVQPGRVFVAGAGRSGLVLRMAAMRLMHFGLTVHVAGDTTTPAISAGDLLLVASGSGTTSGVVKSAETAKKAGARIAAFTTNPDSPLAGLADAVVIIPAAQKTDHGSHISRQYAGSLFEQVLFVVTEAVFQSLWDHTEVEAEELWTRHANLE

SEQ ID NO: 182 - protein, 549 aa, Pseudomonas putida
MGSSHHHHHHSSGLVPRGSHMMASVHGTTYELLRRQGIDTVFGNPGSNELPFLKDFPEDFRYILALQEACVVGIADGYAQASRKPAFINLHSAAGTGNAMGALSNARTSHSPLIVTAGQQTRAMIGVEAGETNVDAANLPRPLVKWSYEPASAAEVPHAMSRAIHMASMAPQGPVYLSVPYDDWDKDADPQSHHLFDRHVSSSVRLNDQDLDILVKALNSASNPAIVLGPDVDAANANADCVMLAERLKAPVWVAPSAPRCPFPTRHPCFRGLMPAGIAAISQLLEGHDVVLVIGAPVFRYVFYDPGQYLKPGTRLISVTCDPLEAARAPMGDAIVADIGAMASALANLVEESSRQLPTAAPEPAKVDQDAGRLHPETVFDTLNDMAPENAIYLNESTSTTAQMWQRLNMRNPGSYYFCAAGGLGFALPAAIGVQLAEPERQVIAVIGDGSANYSISALWTAAQYNIPTIFVIMNNGTYGMLRWFAGVLEAENVPGLDVPGIDFRALAKGYGVQALKADNLEQLKGSLQEALSAKGPVLIEVSTVSPVK

SEQ ID NO: 183 - DNA, 2478 bp, Bifidobacterium breve
atgacaaatcctgttattggcaccccgtggcagaagctggatcgcccggtttccgaagaagccatcgaaggcatggacaagtattggcgcgtcaccaactacatgtccatcggccagatctatctgcgtagcaacccgctgatgaaggaacccttcacccgcgatgacgtgaagcaccgtctggtcggccactggggcaccaccccgggcctgaacttccttctcgcccacatcaaccgcctcatcgctgaccaccagcagaacaccgtgttcatcatgggcccgggccacggcggcccggctggcacctcccagtcttacgttgacggcacgtacaccgagtactacccgaacatcaccaaggacgaagctggcctgcagaagttcttccgccagttctcctacccgggcggcatcccgtcgcacttcgccccggagaccccgggatcgatccacgaaggtggcgagcttggctacgcgctctcccacgcatacggcgccgtgatgaacaacccgagcctgttcgtgccgtgcatcatcggcgacggcgaggccgagaccggcccgctcgccaccggctggcagtccaacaagctcgtcaacccgcgcaccgacggcatcgtgctgccgatcctgcacctcaacggctacaagatcgccaacccgaccatcctcgctcgtatctccgacgaagagctgcatgacttcttccgcggcatgggctaccacccgtacgagttcgttgccggcttcgacaacgaggaccacatgtcgatccaccgtcgtttcgccgagctgttcgagacgatcttcgacgagatctgcgacatcaaggctgcggcccagaccgacgacatgacccgtccgttctacccgatgctcatcttccgcaccccgaagggctggacctgcccgaagttcatcgacggcaagaagaccgaaggctcctggcgtgcgcaccaggtcccgctggcttccgcccgcgacaccgaagagcacttcgaagtcctcaagggctggatggaatcctacaagccggaagagctcttcaacgccgacggctccatcaaggatgacgtcaccgcgttcatgccgaagggcgagctccgcatcggcgccaacccgaacgccaacggtggtgtgatccgcgaggacctgaagctccccgagctcgaccagtacgaggtcaccggcgtcaaggagtacggccatggctggggccaggtcgaggctccgcgtgccctcggtgcatactgccgcgacatcatcaagaacaacccggattcgttccgcatcttcggaccggacgagaccgcttccaaccgcctgaacgcgacctacgaggtcaccgacaagcagtgggacaacggctacctttcgggtctcgtcgacgagcacatggcggtcaccggtcaggtcaccgagcagctctccgagcaccagtgcgagggcttcctcgaggcgtacctcctcaccggccgccacggcatctggagctcctacgagtccttcgtccacgtcatcgactcgatgctcaaccagcatgcgaagtggctcgaggccaccgtccgcgagatcccgtggcgcaagccgatctcctcggtgaacctcctcgtctcctcgcacgtgtggcgtcaggatcacaacggcttctcgcaccaggatccgggtgtcacctcgctcctgatcaacaagacgttcaacaacgatcacgtgacgaacatctacttcgcgaccgacgcgaacatgctgctcgcgatctccgagaagtgcttcaagtccaccaacaagatcaatgcgatcttcgccggcaagcagcctgctccgacgtgggtcacgctcgatgaggcccgcgccgagctcgaagccggcgccgctgagtggaagtgggcttccaacgccgagaacaacgatgaggtccaggtcgtcctcgcttccgctggcgatgtgccgacccaggagctcatggccgcctccgatgccctcaacaagatgggcatcaagttcaaggtcgtcaacgttgttgacctcctgaagctgcagtcccgcgagaacaacgacgaggccctcacggacgaggagttcaccgaactcttcaccgccgacaagccggttctgttcgcataccactcctacgctcaggatgttcgcggcctcatctacgaccgcccgaaccacgacaacttccacgtcgtcggctacaaggagcagggctccacgaccacgccgttcgacatggtccgcgtcaacgacatggatcgctatgcgctccaggccgctgccctcaagctgatcgatgccgacaagtacgccgacaagatcgacgagctcaacgcgttccgcaagaaggcgttccagttcgctgtcgacaacggctacgacatcccggagttcaccgactgggtgtacccggatgtcaaggtcgacgagacgcagatgctttccgcgaccgcggcgaccgcaggcgacaacgagtga

SEQ ID NO: 184 - protein, 825 aa, Bifidobacterium breve
MTNPVIGTPWQKLDRPVSEEAIEGMDKYWRVTNYMSIGQIYLRSNPLMKEPFTRDDVKHRLVGHWGTTPGLNFLLAHINRLIADHQQNTVFIMGPGHGGPAGTSQSYVDGTYTEYYPNITKDEAGLQKFFRQFSYPGGIPSHFAPETPGSIHEGGELGYALSHAYGAVMNNPSLFVPCIIGDGEAETGPLATGWQSNKLVNPRTDGIVLPILHLNGYKIANPTILARISDEELHDFFRGMGYHPYEFVAGFDNEDHMSIHRRFAELFETIFDEICDIKAAAQTDDMTRPFYPMLIFRTPKGWTCPKFIDGKKTEGSWRAHQVPLASARDTEEHFEVLKGWMESYKPEELFNADGSIKDDVTAFMPKGELRIGANPNANGGVIREDLKLPELDQYEVTGVKEYGHGWGQVEAPRALGAYCRDIIKNNPDSFRIFGPDETASNRLNATYEVTDKQWDNGYLSGLVDEHMAVTGQVTEQLSEHQCEGFLEAYLLTGRHGIWSSYESFVHVIDSMLNQHAKWLEATVREIPWRKPISSVNLLVSSHVWRQDHNGFSHQDPGVTSLLINKTFNNDHVTNIYFATDANMLLAISEKCFKSTNKINAIFAGKQPAPTWVTLDEARAELEAGAAEWKWASNAENNDEVQVVLASAGDVPTQELMAASDALNKMGIKFKVVNVVDLLKLQSRENNDEALTDEEFTELFTADKPVLFAYHSYAQDVRGLIYDRPNHDNFHVVGYKEQGSTTTPFDMVRVNDMDRYALQAAALKLIDADKYADKIDELNAFRKKAFQFAVDNGYDIPEFTDWVYPDVKVDETQMLSATAATAGDNE

SEQ ID NO: 185 - DNA, 2145 bp, Escherichia coli
atgtcccgtattattatgctgatccctaccggaaccagcgtcggtctgaccagcgtcagccttggcgtgatccgtgcaatggaacgcaaaggcgttcgtctgagcgttttcaaacctatcgctcagccgcgtaccggtggcgatgcgcccgatcagactacgactatcgtgcgtgcgaactcttccaccacgacggccgctgaaccgctgaaaatgagctacgttgaaggtctgctttccagcaatcagaaagatgtgctgatggaagagatcgtcgcaaactaccacgctaacaccaaagacgctgaagtcgttctggttgaaggtctggtcccgacacgtaagcaccagtttgcccagtctctgaactacgaaatcgctaaaacgctgaatgcggaaatcgtcttcgttatgtctcagggcactgacaccccggaacagctgaaagagcgtatcgaactgacccgcaacagcttcggcggtgccaaaaacaccaacatcaccggcgttatcgttaacaaactgaacgcaccggttgatgaacagggtcgtactcgcccggatctgtccgagattttcgacgactcttccaaagctaaagtaaacaatgttgatccggcgaacgtgcaagaatccagcccgctgccggttctcggcgctgtgccgtggagctttgacctgatcgcgactcgtgcgatcgatatggctcgccacctgaatgcgaccatcatcaacgaaggcgacatcaatactcgccgcgttaaatccgtcactttctgcgcacgcagcattccgcacatgctggagcacttccgtgccggttctctgctggtgacttccgcagaccgtcctgacgtgctggtggccgcttgcctggcagccatgaacggcgtagaaatcggtgccctgctgctgactggcggttacgaaatggacgcgcgcatttctaaactgtgcgaacgtgctttcgctaccggcctgccggtatttatggtgaacaccaacacctggcagacctctctgagcctgcagagcttcaacctggaagttccggttgacgatcacgaacgtatcgagaaagttcaggaatacgttgctaactacatcaacgctgactggatcgaatctctgactgccacttctgagcgcagccgtcgtctgtctccgcctgcgttccgttatcagctgactgaacttgcgcgcaaagcgggcaaacgtatcgtactgccggaaggtgacgaaccgcgtaccgttaaagcagccgctatctgtgctgaacgtggtatcgcaacttgcgtactgctgggtaatccggcagagatcaaccgtgttgcagcgtctcagggtgtagaactgggtgcagggattgaaatcgttgatccagaagtggttcgcgaaagctatgttggtcgtctggtcgaactgcgtaagaacaaaggcatgaccgaaaccgttgcccgcgaacagctggaagacaacgtggtgctcggtacgctgatgctggaacaggatgaagttgatggtctggtttccggtgctgttcacactaccgcaaacaccatccgtccgccgctgcagctgatcaaaactgcaccgggcagctccctggtatcttccgtgttcttcatgctgctgccggaacaggtttacgtttacggtgactgtgcgatcaacccggatccgaccgctgaacagctggcagaaatcgcgattcagtccgctgattccgctgcggccttcggtatcgaaccgcgcgttgctatgctctcctactccaccggtacttctggtgcaggtagcgacgtagaaaaagttcgcgaagcaactcgtctggcgcaggaaaaacgtcctgacctgatgatcgacggtccgctgcagtacgacgctgcggtaatggctgacgttgcgaaatccaaagcgccgaactctccggttgcaggtcgcgctaccgtgttcatcttcccggatctgaacaccggtaacaccacctacaaagcggtacagcgttctgccgacctgatctccatcgggccgatgctgcagggtatgcgcaagccggttaacgacctgtcccgtggcgcactggttgacgatatcgtctacaccatcgcgctgactgcgattcagtctgcacagcagcagtaa

SEQ ID NO: 186 - protein, 714 aa, Escherichia coli
MSRIIMLIPTGTSVGLTSVSLGVIRAMERKGVRLSVFKPIAQPRTGGDAPDQTTTIVRANSSTTTAAEPLKMSYVEGLLSSNQKDVLMEEIVANYHANTKDAEVVLVEGLVPTRKHQFAQSLNYEIAKTLNAEIVFVMSQGTDTPEQLKERIELTRNSFGGAKNTNITGVIVNKLNAPVDEQGRTRPDLSEIFDDSSKAKVNNVDPAKLQESSPLPVLGAVPWSFDLIATRAIDMARHLNATIINEGDINTRRVKSVTFCARSIPHMLEHFRAGSLLVTSADRPDVLVAACLAAMNGVEIGALLLTGGYEMDARISKLCERAFATGLPVFMVNTNTWQTSLSLQSFNLEVPVDDHERIEKVQEYVANYINADWIESLTATSERSRRLSPPAFRYQLTELARKAGKRIVLPEGDEPRTVKAAAICAERGIATCVLLGNPAEINRVAASQGVELGAGIEIVDPEVVRESYVGRLVELRKNKGMTETVAREQLEDNVVLGTLMLEQDEVDGLVSGAVHTTANTIRPPLQLIKTAPGSSLVSSVFFMLLPEQVYVYGDCAINPDPTAEQLAEIAIQSADSAAAFGIEPRVAMLSYSTGTSGAGSDVEKVREATRLAQEKRPDLMIDGPLQYDAAVMADVAKSKAPNSPVAGRATVFIFPDLNTGNTTYKAVQRSADLISIGPMLQGMRKPVNDLSRGALVDDIVYTIALTAIQSAQQQ

SEQ ID NO: 187 - DNA, 642 bp, Escherichia coli
atgaaaaactggaaaacaagtgcagaatcaatcctgaccaccggcccggttgtaccggttatcgtggtaaaaaaactggaacacgcggtgccgatggcaaaagcgttggttgctggtggggtgcgcgttctggaagtgactctgcgtaccgagtgtgcagttgacgctatccgtgctatcgccaaagaagtgcctgaagcgattgtgggtgccggtacggtgctgaatccacagcagctgacagaagtcactgaagcgggtgcacagttcgcaattagcccgggtctgaccgagccgctgctgaaagctgctaccgaagggactattcctctgattccggggatcagcactgtttccgaactgatgctgggtatggactacggtttgaaagagttcaaattcttcccggctgaagctaacggcggcgtgaaagccctgcaggcgatcgcgggtccgttctcccaggtccgtttctgcccgacgggtggtatttctccggctaactaccgtgactacctggcgctgaaaagcgtgctgtgcatcggtggttcctggctggttccggcagatgcgctggaagcgggcgattacgaccgcattactaagctggcgcgtgaagctgtagaaggcgctaagctgtaa

SEQ ID NO: 188 - protein, 213 aa, Escherichia coli
MKNWKTSAESILTTGPVVPVIVVKKLEHAVPMAKALVAGGVRVLEVTLRTECAVDAIRAIAKEVPZAIVGAGTVLNPQQLAEVTEAGAQFAISPGLTEPLLKAATEGTIPLIPGISTVSELMLGMDYGLKEFKFFPAEANGGVKALQAIAGPFSQVRFCPTGGISPANYRDYLALKSVLCIGGSWLVPADALEAGDYDRITKLAREAVEGAKL

SEQ ID NO: 189 - DNA, 1644 bp, Lactococcus lactis
atgtatacagtaggagattacctgttagaccgattacacgagttgggaattgaagaaatttttggagttcctggtgactataacttacaatttttagatcaaattatttcacgcgaagatatgaaatggattggaaatgctaatgaattaaatgcttcttatatggctgatggttatgctcgtactaaaaaagctgccgcatttctcaccacatttggagtcggcgaattgagtgcgatcaatggactggcaggaagttatgccgaaaatttaccagtagtagaaattgttggttcaccaacttcaaaagtacaaaatgacggaaaatttgtccatcatacactagcagatggtgattttaaacactttatgaagatgcatgaacctgttacagcagcgcggactttactgacagcagaaaatgccacatatgaaattgaccgagtactttctcaattactaaaagaaagaaaaccagtctatattaacttaccagtcgatgttgctgcagcaaaagcagagaagcctgcattatctttagaaaaagaaagctctacaacaaatacaactgaacaagtgattttgagtaagattgaagaaagtttgaaaaatgcccaaaaaccagtagtgattgcaggacacgaagtaattagttttggtttagaaaaaacggtaactcagtttgtttcagaaacaaaactaccgattacgacactaaattttggtaaaagtgctgttgatgaatctttgccctcatttttaggaatatataacgggaaactttcagaaatcagtcttaaaaattttgtggagtccgcagactttatcctaatgcttggagtgaagcttacggactcctcaacaggtgcattcacacatcatttagatgaaaataaaatgatttcactaaacatagatgaaggaataattttcaataaagtggtagaagattttgattttagagcagtggtttcttctttatcagaattaaaaggaatagaatatgaaggacaatatattgataagcaatatgaagaatttattccatcaagtgctcccttatcacaagaccgtctatggcaggcagttgaaagtttgactcaaagcaatgaaacaatcgttgctgaacaaggaacctcattttttggagcttcaacaattttcttaaaatcaaatagtcgttttattggacaacctttatggggttctattggatatacttttccagcggctttaggaagccaaattgcggataaagagagcagacaccttttatttattggtgatggttcacttcaacttaccgtacaagaattaggactatcaatcagagaaaaactcaatccaatttgttttatcataaataatgatggttatacagttgaaagagaaatccacggacctactcaaagttataacgacattccaatgtggaattactcgaaattaccagaaacatttggagcaacagaagatcgtgtagtatcaaaaattgttagaacagagaatgaatttgtgtctgtcatgaaagaagcccaagcagatgtcaatagaatgtattggatagaactagttttggaaaaagaagatgcgccaaaattactgaaaaaaatgggtaaattatttgctgagcaaaataaatag

SEQ ID NO: 190 - protein, 547 aa, Lactococcus lactis
MYTVGDYLLDRLHELGIEEIFGVPGDYNLQFLDQIISREDMKWIGNANELNASYMADGYARTKKAAAFLTTFGVGELSAINGLAGSYAENLPVVEIVGSPTSKVQNDGKFVHHTLADGDFKHFMKMHEPVTAARTLLTAENATYEIDRVLSQLLKERKPVYINLPVDVAAAKAEKPALSLEKESSTTNTTEQVILSKIEESLKNAQKPVVIAGHEVISFGLEKTVTQFVSETKLPITTLNFGKSAVDESLPSFLGIYNGKLSEISLKNFVESADFILMLGVKLTDSSTGAFTHHLDENKMISLNIDEGIIFNKVVEDFDFRAVVSSLSELKGIEYEGQYIDKQYEEFIPSSAPLSQDRLWQAVESLTQSNETIVAEQGTSFFGASTIFLKSNSRFIGQPLWGSIGYTFPAALGSQIADKESRHLLFIGDGSLQLTVQELGLSIREKLNPICFIINNDGYTVEREIHGPTQSYNDIPMWNYSKLPETFGATEDRVVSKIVRTENEFVSVMKEAQADVNRMYWIELVLEKEDAPKLLKKMGKLFAEQNK

SEQ ID NO: 191 - DNA, 1164 bp, Klebsiella pneumoniae
atgagctatcgtatgtttgattatctggtgccaaacgttaacttttttggccccaacgccatttccgtagtcggcgaacgctgccagctgctgggggggaaaaaagccctgctggtcaccgacaaaggcctgcgggcaattaaagatggcgcggtggacaaaaccctgcattatctgcgggaggccgggatcgaggtggcgatctttgacggcgtcgagccgaacccgaaagacaccaacgtgcgcgacggcctcgccgtgtttcgccgcgaacagtgcgacatcatcgtcaccgtgggcggcggcagcccgcacgattgcggcaaaggcatcggcatcgccgccacccatgagggcgatctgtaccagtatgccggaatcgagaccctgaccaacccgctgccgcctatcgtcgcggtcaataccaccgccggcaccgccagcgaggtcacccgccactgcgtcctgaccaacaccgaaaccaaagtgaagtttgtgatcgtcagctggcgcaacctgccgtcggtctctatcaacgatccactgctgatgatcggtaaaccggccgccctgaccgcggcgaccgggatggatgccctgacccacgccgtagaggcctatatctccaaagacgctaacccggtgacggacgccgccgccatgcaggcgatccgcctcatcgcccgcaacctgcgccaggccgtggccctcggcagcaatctgcaggcgcgggaaaacatggcctatgcttctctgctggccgggatggctttcaataacgccaacctcggctacgtgcacgccatggcgcaccagctgggcggcctgtacgacatgccgcacggcgtggccaacgctgtcctgctgccgcatgtggcgcgctacaacctgatcgccaacccggagaaattcgccgatatcgctgaactgatgggcgaaaatatcaccggactgtccactctcgacgcggcggaaaaagccatcgccgctatcacgcgtctgtcgatggatatcggtattccgcagcatctgcgcgatctgggggtaaaagaggccgacttcccctacatggcggagatggctctaaaagacggcaatgcgttctcgaacccgcgtaaaggcaacgagcaggagattgccgcgattttccgccaggcattctga

SEQ ID NO: 192 - protein, 387 aa, Klebsiella pneumoniae
MSYRMFDYLVPNVNFFGPNAISVVGERCQLLGGKKALLVTDKGLRAIKDGAVDKTLHYLREAGIEVAIFDGVEPNPKDTNVRDGLAVFRREQCDIIVTVGGGSPHDCGKGIGIAATHEGDLYQYAGIETLTNPLPPIVAVNTTAGTASEVTRHCVLTNTETKVKFVIVSWRNLPSVSINDPLLMIGKPAALTAATGMDALTHAVEAYISKDANPVTDAAAMQAIRLIARNLRQAVALGSNLQAREYMAYASLLAGMAFNNANLGYVHAMAHQLGGLYDMPHGVANAVLLPHVARYNLIANPEKFADIAELMGENITGLSTLDAAEKAIAAITRLSMDIGIPQHLRDLGVKETDFPYMAEMALKDGNAFSNPRKGNEQEIAAIFRQAF

SEQ ID NO: 193 - DNA, 1806 bp, Methylobacterium sp.
atgagagcggtacatctccttgcgctcggcgcaggtgtcgcggccgtcgccgcgccggcgctggccaatgaaagcgtcatgaagggcatcgccaacccggcggaacaggttcttcagacggttgattacgcgaatacgcgttattcgaagctcgaccagatcaacgccaagaacgtcaaggatctccaggtcgcctggacgttctcgaccggcgttctgcgcggccacgagggctcgccgctcgtcgtcggcaacatcatgtacgtgcacacgccgttcccgaacatcgtgtacgccctcgacctcgaccacgaggcgaagatcatctggaagtacgagccgaagcaggatccgtccgtgatcccggtcatgtgctgtgacacggtcaaccgtggcctggcctacgccgacggcgccatcctcctgcaccaggccgacaccaccctcgtgtcgctcgacgccaagaccggcaaggtcaactggtcggtcgtgaacggcgatccgaagaagggcgagaccaacaccgccacggttctgcccgtgaaggacaaggtcatcgtcggcatctccggcggcgagttcggcgtgcagtgccacgtcaccgcctacgacctgaagaccggcaagaaggtgtggcgcggctactccgagggcccggacgatcagatgatcgtggacccggagaagaccacgtcgctcggcaagccgatcggcaaggactcctcgctgaagacctgggaaggcgatcagtggaagaccggcggcggctgcacctggggctggttctcgtacgatccgaagctcgacctgatgtactacggctcgggcaacccctcgacctggaaccccaagcagcgtccgggcgacaacaagtggtccatgaccatctgggcgcgtaacccggataccggcatggccaagtgggtctaccagatgaccccgcacgacgagtgggactacgacggcatcaacgagatgatcctcacggatcagaaggttgacggcaaggaccagccgctcctgacccacttcgaccgtaacggcttcggctacacgctgaaccgcgagaccggcgccctgctcgtcgccgagaagttcgacccggccgtcaactgggcgtccaaggtcgacatggacaagggctcgaagaactacggccgtccgctggtcgtgtcgaagtactcgaccgagcagaacggtgaggacaccaactccaagggcatctgcccggcggcgctgggcaccaaggatcagcagcctgcggccttctcgccgaagaccaacctgttctacgtgcccaccaaccacgtctgcatggactacgagccgttccgggtgacctacaccccgggccagccctacgtcggtgcgaccctctcgatgtacccggccccgaactcgcacggcggcatgggcaacttcatcgcgtgggatggcgtcaacggcaagatcaagtggtccaaccccgagcagttctcggtgtggtccggtgctctggccaccgctggcgacgtcgtgttctacggcacgcttgagggctacctgaaggcggtcgacgacaagaccggcaaggagctgttcaagttcaagaccccgtcgggcatcatcggtaacgtgatgacctaccagcacaagggcaagcagtacgtgggcgtcctgtcgggcgtcggcggctgggctggcatcggcctcgcggccggcctgaccgacccgaacgccggcctcggcgcggtgggtggctacgcggctctgtcgcagtacaccaacctcggcggccagctgacggtcttcgccctgccgaactaa

SEQ ID NO: 194 - protein, 601 aa, Methylobacterium sp.
MRAVHLLALGAGVAAVAAPALANESVMKGIANPAEQVLQTVDYANTRYSKLDQINAKNVKDLQVAWTFSTGVLRGHEGSPLVVGNIMYVHTPFPNIVYALDLDHEAKIIWKYEPKQDPSVIPVMCCDTVNRGLAYADGAILLHQADTTLVSLDAKTGKVNWSVVNGDPKKGETNTATVLPVKDKVIVGISGGEFGVQCHVTAYDLKTGKKVWRGYSEGPDDQMIVDPEKTTSLGKPIGKDSSLKTWEGDQWKTGGGCTWGWFSYDPKLDLMYYGSGNPSTWNPKQRPGDNKWSMTIWARNPDTGMAKWVYQMTPHDEWDYDGINEMILTDQKVDGKDQPLLTHFDRNGFGYTLNRETGALLVAEKFDPAVNWASKVDMDKGSKNYGRPLVVSKYSTEQNGEDTNSKGICPAALGTKDQQPAAFSPKTNLFYVPTNHVCMDYEPFRVTYTPGQPYVGATLSMYPAPNSHGGMGNFIAWDGVNGKIKWSNPEQFSVWSGALATAGDVVFYGTLEGYLKAVDDKTGKELFKFKTPSGIIGNVMTYQHKGKQYVGVLSGVGGWAGIGLAAGLTDPNAGLGAVGGYAALSQYTNLGGQLTVFALPN

SEQ ID NO: 195 - DNA, 1155 bp, Methylobacterium sp.
atgagagcaatcgtctataatggaccccgcgatgtttcgatgcaggacgtgccggatgcgaagatcgtgaagccgaccgacgttctggtccgcatcacgagcaccaacatctgcggctccgacctacatatgtacgaaggccgaaccgattttccccaaggtggcgtgttcgggcacgagaacctgggacaggtggcggaagtcggcagcgccgtcgatcgggtgcaggtcggggactgggtcgccgtcccgttcaacatcggctgcgggttctgcgaaaactgcgagcgcggcctgagcgcctactgcttgaccacggcggatcgaagcgtcgtgccgaacatggcgggcgcggcctacggctttgccggcatgggaccgtatcgcggcggtcaggccgattttctgcgcgtcccctatggcgactataactgtctgcagctgccgccggacgcggaggagaggcagaacgactatgtcatgctggccgacatctttccgaccggctggcactgcacggaactcgcaggcgtgaagcccggcgaaaccgttgtggtttacggggccgggccggtcggtctcatggccgcctactcggcgatgatcaagggtgcgtccctggtcatggttgtcgatcgccatcccgaccggctgcgcctcgccgaatcgatcggtgccgtgaccatcgacgattccaaggactccccggtggacaaggtgcttgagttgacgaagggcgtcggcgccgaccgcggctgcgagtgcgtcggctaccaagcgcacgaccccagcggccaggagcgccccaatatgaccatgaacgacttggtcaagtcggtgaaattcaccggcggcatcggcgtggtcggcgtcttcacgccccaggatccggccccgcaggacccgctctacaagcagggcgagattgtgttcgaccacggcctcttctggttcaaaggtcagacgatcggcgtcggccagtgcaacgtgaaggcctataaccggcagttgcgcgacctcatctcgaccggccgggcgaagccgtccttcatcgtctcgcacgagcttccgctgggagaggcgccgaaggcctacaagcacttcgacgcgcgcgacgatggctggaccaaggtgatcctcaagcccgccgcctga

SEQ ID NO: 196 - protein, 384 aa, Methylobacterium sp.
MRAIVYNGPRDVSMQDVPDAKIVKPTDVLVRITSTNICGSDLHMYEGRTDFPQGGVFGHENLGQVAEVGSAVDRVQVGDWVAVPFNIGCGFCENCERGLSAYCLTTADRSVVPNMAGAAYGFAGMGPYRGGQADFLRVPYGDYNCLQLPPDAEERQNDYVMLADIFPTGWHCTELAGVKPGETVVVYGAGPVGLMAAYSAMIKGASLVMVVDRHPDRLRLAESIGAVTIDDSKDSPVDKVLELTKGVGADRGCECVGYQAHDPSGQERPNMTMNDLVKSVKFTGGIGVVGVFTPQDPAPQDPLYKQGEIVFDHGLFWFKGQTIGVGQCNVKAYNRQLRDLISTGRAKPSFIVSHELPLGEAPKAYKHFDARDDGWTKVILKPAA

SEQ ID NO: 197 - DNA, 1539 bp, Methylobacterium sp.
atgtccggcacgtcgcactcgcccgccgccgaccgggtcgccgccctcctgaccgacttcctgccgggcggccgcatcggcagcgtcgtggccggcgaggtcctcgccgggaccggcgccgccctcgacctcgtcaaccccgcggacggcggcgtgctcgcgaccttcgccgatgccgggccgtcggtggtcgaggccgcgatggcggcggcccgcgacgcccagcgcgcgtggtgggggatgagcgccgccgcccggggccgggccctgtgggcggtcgccgccctggtccggcagcacgccggggcgctcgctgagctggagaccctctcggccggcaagccgatccgcgacacgcgcggcgaggtcgccaaggtcgccgagatgttcgagtattatgccggctggtgcgacaagcttcacggcgacgtcatcccggtgccgagttcgcacctgaactacacccgccacgagcccttcggcaccgtggtgcagatcaccccctggaacgcgccgatcttcaccgccggctggcagatcgccccggccctctgcgccggcaacgccgtggtgctgaagccctccgagctgacaccgctgacctcgctggcgctgggcctgctctgcgaccgcgccgaggggatgccccgcggcctcgtctcggtgctggccggcgccggtccgaccacgggggccgccgcggtggcccatcccgacacccgcctcgtcgtgttcgtcggctcggccgaggccggcgcgcagatcgccgccgcggcggcccgcgccatcgtgccgagcgtgctggagctcggcggcaagtcggccaacatcgtgttcgccgacgccgacctcgaccgggcgctgatcggcgcgcaggccgcgatcttcggcggcgccggccagagctgcgtggcgggctcccgcctcctcgtgcaccgttcgatccacgcgtccttcgtggagcgcctgtcccacgccgccgcgcgcatcccggtgggggcgccgaccgacccggcgacgcagatcgggccgatcaacaaccggcgccagcgcgacaagatcgccggcatggtcgaggccgcggcgagcgccggcgccaccatcgcggccggcggggcctgccccgcgtccctgcgggacacgggcggcttctatttcggcccgaccatcgtggacggcgtcgcgccggacgcggcgatcgcccgggaggaggtgttcggcccggtcctcacggtcctgccgttcgacggcgaggacgaggcggtggcgctggccaacggcacgccctacggcctcgcgggcgcggtctggaccggcgacggcggtcgcggccaccgggtcgcggcggctttgcgggccggaacggtgtgggtcaacggctacaagaccatcaacgtggcctcgccgttcggcggcttcggccgctcgggcttcggccgctcctcgggccgcgaggcgctgatggcctacacgcagaccaagagcgtctgggtcgagaccgcggcccagccggcggtgaccttcggctacgtgggctag

SEQ ID NO: 198 - protein, 512 aa, Methylobacterium sp.
MSGTSHSPAADRVAALLTDFLPGGRIGSVVAGEVLAGTGAALDLVNPADGGVLATFADAGPSVVEAAMAAARDAQRAWWGMSAAARGRALWAVAALVRQHAGALAELETLSAGKPIRDTRGEVAKVAEMFEYYAGWCDKLHGDVIPVPSSHLNYTRHEPFGTVVQITPWNAPIFTAGWQIAPALCAGNAVVLKPSELTPLTSLALGLLCDRAEGMPRGLVSVLAGAGPTTGAAAVAHPDTRLVVFVGSAEAGAQIAAAAARAIVPSVLELGGKSANIVFADADLDRALIGAQAAIFGGAGQSCVAGSRLLVHRSIHASFVERLSHAAARIPVGAPTDPATQIGPINNRRQRDKIAGMVEAAASAGATIAAGGACPASLRDTGGFYFGPTIVDGVAPDAAIAREEVFGPVLTVLPFDGEDEAVALANGTPYGLAGAVWTGDGGRGHRVAAALRAGTVWVNGYKTINVASPFGGFGRSGFGRSSGREALMAYTQTKSVWVETAAQPAVTFGYVG

SEQ ID NO: 199 - DNA, 2121 bp, Candida boidinii
atggctttagctaaggctgcttctataaatgatgacatccacgatcttacaatgagagcgttcagatgctacgtccttgaccttgtcgagcaatatgagggcggtcacccaggttctgccatgggtatggtcgcgatgggtatcgccctatggaaatacactatgaaatacagcactaatgacccaacgtggttcaacagggatagatttgtattatccaacggtcacgtctgtcttttccaatatctctttcagcacttgagtggcttaaaatcaatgactgagaagcagttaaagagttaccactctagtgattatcactcaaagtgtccgggacatccggaaatcgagaatgaggccgtagaggtgactacaggccctcttggtcagggcatatcgaattcagttggtctggccatcgcctcaaagaatcttggtgcactttataacaaacctggctatgaagtggtaaacaacaccacatactgcattgtaggcgatgcatgccttcaagaggggccagcccttgagtccatatccttcgcagggcacctcggactcgacaatctcgtcgttatctatgacaataaccaagtgtgttgtgacggttctgtggatattgccaacactgaggatatttcagcaaagtttcgagcttgtaattggaacgtgatcgaggtcgaggacggcgcaagggatgttgctacgattgttaaggctttggagttagcaggggccgagaagaaccggccaactcttatcaacgtgcggacgataattggtactgactcagcctttcagaatcactgcgccgcgcatggttctgctctgggtgaggaaggaattcgtgaactaaagataaaatacggtttcaatccgagccagaaattccattttccccaggaagtatacgatttcttctcggacattcctgcaaaaggtgacgaatacgtctccaattggaacaagctagtgagctcatatgttaaagagtttccagaattgggcgcagaattccagtctagggtcaagggagaacttcccaagaactggaaatctttattaccgaacaacttgcctaatgaggacactgctactcgaacaagtgcacgtgcgatggtgcgtgcgctcgctaaagatgtgcctaatgtgatcgcggggtccgcggacctctccgtttcagtcaatctaccttggccgggtagcaaatattttgagaatccacaattagcaactcagtgcggactagcaggtgactattccggaagatacgtggaattcggtataagggaacactgtatgtgcgcgatcgccaacgggcttgctgcgttcaacaaaggtactttcttgccaataacttcatcgttctacatgttctatctctatgcagctccggcccttaggatggctgcacttcaagagctcaaggccattcacatcgctactcacgactctatcggagctggagaggacggcccaacgcaccaacccattgctcaaagcgcgctttggcgagctatgccaaacttttactacatgaggcccggggatgcaagcgaggtacggggactctttgagaaagcagttgaattgcccttaagtaccctgttcagtttaagtcggcacgaagtgccacaataccctggcaagagctcgatcgagttggccaagagaggcggctatgtgttcgaagatgctaaagatgctgatatacagcttatcggtgcgggaagcgaactcgaacaggccgttaaaactgctcgaatactccgatcgagaggtcttaaagtccgtatccttagcttcccatgtcagcgtttatttgacgagcaatcggtgggataccgtagaagtgttcttcaaagaggtaaggtcccgactgtggtgatcgaggcatatgttgcgtatggatgggagagatacgctactgcaggttatactatgaacacgttcggaaagtccctgccggtagaggatgtgtatgagtactttggtttcaatccatccgaaatcagcaagaaaattgagggatatgtgagagccgtcaaagccaatccagatttgctctacgaatttatcgatctcacagagaagcctaaacacgatcaaaatcacctttaa

SEQ ID NO: 200 - protein, 706 aa, Candida boidinii
MALAKAASINDDIHDLTMRAFRCYVLDLVEQYEGGHPGSAMGMVAMGIALWKYTMKYSTNDPTWFNRDRFVLSNGHVCLFQYLFQHLSGLKSMTEKQLKSYHSSDYHSKCPGHPEIENEAVEVTTGPLGQGISNSVGLAIASKNLGALYNKPGYEVVNNTTYCIVGDACLQEGPALESISFAGHLGLDNLVVIYDNNQVCCDGSVDIANTEDISAKFRACNWNVIEVEDGARDVATIVKALELAGAEKNRPTLINVRTIIGTDSAFQNHCAAHGSALGEEGIRELKIKYGFNPSQKFHFPQEVYDFFSDIPAKGDEYVSNWNKLVSSYVKEFPELGAEFQSRVKGELPKNWKSLLPNNLPNEDTATRTSARAMVRALAKDVPNVIAGSADLSVSVNLPWPGSKYFENPQLATQCGLAGDYSGRYVEFGIREHCMCAIANGLAAFNKGTFLPITSSFYMFYLYAAPALRMAALQELKAIHIATHDSIGAGEDGPTHQPIAQSALWRAMPNFYYMRPGDASEVRGLFEKAVELPLSTLFSLSRHEVPQYPGKSSIELAKRGGYVFEDAKDADIQLIGAGSELEQAVKTARILRSRGLKVRILSFPCQRLFDEQSVGYRRSVLQRGKVPTVVIEAYVAYGWERYATAGYTMNTFGKSLPVEDVYEYFGFNPSEISKKIEGYVRAVKANPDLLYEFIDLTEKPKHDQNHL

SEQ ID NO: 201 - DNA, 1692 bp, Artificial Sequence
  Synthetic Formolase (Formolase) Nucleic Acid Coding Sequence
atggctatgataactggtggtgaacttgttgtgagaaccctgattaaggccggagtagaacacctgtttgggttgcacggaatccatatcgacacaattttccaggcgtgtttggaccacgacgttcctatcattgacacaagacacgaagccgccgcgggccatgctgccgaaggatatgccagagcaggtgctaagttaggggtcgcgctggtgaccgcaggtggtggattcactaacgcggttacgccaattgccaacgccaggacagacaggaccccagttttgttcttgaccggtagcggtgctttaagagacgacgaaaccaatactcttcaggcaggtatcgaccaggttgcaatggcggcccctataactaagtgggctcatagagttatggcgaccgaacatataccgaggctcgtgatgcaggcaatcagggctgctttatccgctcctcgtggacctgtgctgttggaccttccttgggatatcctcatgaaccaaatagacgaagattcagttataattcctgacttggtcctctccgcacacggagcacatcccgatcctgcggatcttgaccaggcgctcgcactcctcaggaaagccgaaagaccagtaattgtgctgggctcagaggcctctcgaacagctcgtaaaacagcattatcagctttcgtcgccgccaccggagtcccagtgtttgcagactacgagggactaagtatgctatctgggctgcctgacgctatgaggggtggccttgtccagaatttatatagctttgccaaggctgacgcagcacccgatcttgttcttatgttgggtgctcgtttcggtcttaatacaggtcacggttcaggtcaattgattccacatagtgctcaggtcatacaagtcgacccggatgcttgcgagctaggcagactccaaggaatcgctctcggaatagttgccgacgttggtgggacaatagaagcgctagcacaagcaacagcacaagacgccgcctggccagatcgtggtgactggtgcgcaaaggtgactgacctggcccaagaacgttatgccagcatcgccgcgaagtcctcatcagagcacgctctccacccattccatgcttcgcaggtgatagctaaacacgttgacgctggtgttacagtcgttgcggacggcggactaacttacctttggctttcagaggtaatgtcaagggtaaagccaggtggattcctctgccacggctatcttaacagcatgggtgtcggtttcggaactgcgctcggcgcccaggtagcagacctcgaagcgggaagaagaacgatactcgttactggggacggatcagttggctacagtataggtgaatttgacactctcgtacgaaaacaattgccacttattgttattataatgaacaaccaatcttggggctggactttgcacttccagcaattagcagtcggaccaaacagggttacaggtactagacttgagaatgggtcctaccatggggtggctgcagcttttggggccgacggatatcacgtggactcggttgaatcattcagcgctgctttggcacaggccctggcacataacaggcctgcatgcattaacgttgcagtggctctcgacccaattccgcctgaggagctgatactcattggcatggatcctttcgcctga

SEQ ID NO: 202 - protein, 563 aa, Artificial Sequence
  Synthetic Formolase (Formolase) Amino Acid Sequence
MAMITGGELVVRTLIKAGVEHLFGLHGIHIDTIFQACLDHDVPIIDTRHEAAAGHAAEGYARAGAKLGVALVTAGGGFTNAVTPIANARTDRTPVLFLTGSGALRDDETNTLQAGIDQVAMAAPITKWAHRVMATEHIPRLVMQAIRAALSAPRGPVLLDLPWDILMNQIDEDSVIIPDLVLSAHGAHPDPADLDQALALLRKAERPVIVLGSEASRTARKTALSAFVAATGVPVFADYEGLSMLSGLPDAMRGGLVQNLYSFAKADAAPDLVLMLGARFGLNTGHGSGQLIPHSAQVIQVDPDACELGRLQGIALGIVADVGGTIEALAQATAQDAAWPDRGDWCAKVTDLAQERYASIAAKSSSEHALHPFHASQVIAKHVDAGVTVVADGGLTYLWLSEVMSRVKPGGFLCHGYLNSMGVGFGTALGAQVADLEAGRRTILVTGDGSVGYSIGEFDTLVRKQLPLIVIIMNNQSWGWTLHFQQLAVGPNRVTGTRLENGSYHGVAAAFGADGYHVDSVESFSAALAQALAHNRPACINVAVALDPIPPEELILIGMDPFA

SEQ ID NO: 203 - DNA, 1692 bp, Pseudomonas fluorescens
atggcgatgattacaggcggcgaactggttgttcgcaccctaataaaggctggggtcgaacatctgttcggcctgcacggcgcgcatatcgatacgatttttcaagcctgtctcgatcatgatgtgccgatcatcgacacccgccatgaggccgccgcagggcatgcggccgagggctatgcccgcgctggcgccaagctgggcgtggctggtcacggcgggcgggggatttaccaatgcggtcacgcccattgccaacgcttggctggatcgcaaggccggtgtattcctcacccgggatcgggcgcgctgcgtgatgatgaaaccaacacgttgcaggcggggattgatcaggtcgccatggcggcgcccattaccaaatgggcgcatcgggtgatggcaaccgagcatatcccacggctggtgatgcaggcgatccgcgccgcgttgagcgcgccacgcgggccggtgttgctggatctgccgtgggatattctgatgaaccagattgatgaggatagcgtcattatccccgatctggtcttgtccgcgcatggggccagacccgaccctgccgatctggatcaggctctcgcgcttttgcgcaaggcggagcggccggtcatcgtgctcggctcagaagcctcgcggacagcgcgcaagacggcgcttagcgccttcgtggcggcgactggcgtgccggtgtttgccgattatgaagggctaagcatgctctcggggctgcccgatgctatgcggggcgggctggtgcaaaacctctattcttttgccaaagccgatgccgcgccagatctcgtgctgatgctgggggcgcgctttggccttaacaccgggcatggatctgggcagttgatcccccatagcgcgcaggtcattcaggtcgaccctgatgcctgcgagctgggacgcctgcagggcatcgctctgggcattgtggccgatgtgggtgggaccatcgaggctttggcgcaggccaccgcgcaagatgcggcttggccggatcgcggcgactggtgcgccaaagtgacggatctggcgcaagagcgctatgccagcatcgctgcgaaatcgagcagcgagcatgcgctccacccctttcacgcctcgcaggtcattgccaaacacgtcgatgcaggggtgacggtggtagcggatggtgcgctgacctatctctggctgtccgaagtgatgagccgcgtgaaacccggcggttttctctgccacggctatctaggctcgatgggcgtgggcttcggcacggcgctgggcgcgcaagtggccgatcttgaagcaggccgccgcacgatccttgtgaccggcgatggctcggtgggctatagcatcggtgaatttgatacgctggtgcgcaaacaattgccgctgatcgtcatcatcatgaacaaccaaagctggggggcgacattgcatttccagcaattggccgtcggccccaatcgcgtgacgggcacccgtttggaaaatggctcctatcacggggtggccgccgcctttggcgcggatggctatcatgtcgacagtgtggagagcttttctgcggctctggcccaagcgctcgcccataatcgccccgcctgcatcaatgtcgcggtcgcgctcgatccgatcccgcccgaagaactcattctgatcggcatggaccccttcgcatga

SEQ ID NO: 204 - protein, 563 aa, Pseudomonas fluorescens [sequence omitted]

SEQ ID NO: 205 - DNA, 2133 bp, Ogataea polymorpha
atgagtatgagaatccctaaagcagcgtcggtcaacgacgaacaacaccagagaatcatcaagtacggtcgtgctcttgtcctggacattgtcgagcagtacggaggaggccacccgggctcggccatgggcgccatggctatcggaattgctctgtggaaatacaccctgaaatatgctcccaacgaccctaactacttcaacagagacaggtttgtcctgtcgaacggtcacgtgtgtctgttccagtatatcttccagcacctgtacggtctcaagtcgatgaccatggcgcagctgaagtcctaccactcgaatgacttccactcgctgtgtcccggtcacccagaaatcgagcacgacgccgtcgaggtcacaacgggcccgctcggccagggtatctcgaactctgttggtctggccatagccaccaaaaacctggctgccacgtacaacaagccgggctttgatatcatcaccaacaaggtgtactgcatggttggcgatgcgtgcttgcaggagggccctgctctcgagtcgatctcgctggccggccacatggggctggacaatctgattgtgctctacgacaacaaccaggtctgctgtgacggcagtgttgacattgccaacacggaggacatcagtgccaagttcaaggcctgcaactggaacgtgatcgaggtcgagaacgcttccgaggacgtggctaccattgtcaaggccttggagtacgcgcaggccgagaagcacagaccaacacttatcaactgcagaactgtgattggatcgggtgctgcgttcgagaaccactgtgctgcgcacggtaacgctctgggcgaggacggtgtgcgcgagctcaaaatcaagtacggcatgaacccggcccagaagttctacattccgcaggacgtgtacgacttcttcaaggagaagccggccgagggcgacaagctggtggccgaatggaagagtctcgtggccaagtacgtcaaggcgtaccctgaggagggccaggagtttttggcgcggatgagaggcgagctgccaaagaactggaagtcgttcctgccgcagcaggaattcaccggcgacgctcctacaagggccgctgccagagagcttgtgagagccctggggcagaactgcaagtcggtgattgccggttgcgcagacctgtctgtgtctgtcaatttgcagtggccaggggtgaaatatttcatggacccctcgctgtccacgcagtgtggcctgagcggcgactactccggcagatacattgagtacggaatcagagaacacgccatgtgtgctatcgccaatggccttgccgcctacaacaagggcacgttcctgccgatcacgtcgactttcttcatgttctacctgtacgctgccccagccatcagaatggccggcctgcaggagctcaaggcgatccacatcggcacccacgactcgatcaatgagggtgagaacggccctacgcaccagccggtcgagtcgccagcattgttccgggccatgccaaacatttactacatgagaccggtcgactctgcagaagtgtttggcctgttccaaaaagccgtcgagctgccattcagctcgattctgtcgctctcgagaaacgaggtgctgcaataccctggcaagtcgagcgcagagaaggcgcaacgcggcggctatattctggaggatgcggagaacgccgaggtgcagattattggagttggtgcagagatggagtttgcatacaaggccgccaagatcttgggcagaaagttcaggaccagagttctctccatcccatgcacgcggctgtttgacgagcagtcgatcggctatagacgctcggttttgagaaaggacggcagacaggtgccaacggtggtggtggacggccacgttgcgttcggctgggagagatacgctacggcgtcctactgtatgaacacgtacggcaagtctctgcctccagaagtgatctacgagtactttggatacaacccggcaacgattgccaagaaggtcgaagcgtacgtccgggcgtgccaaagagaccctttgctgctccacgacttcctggacctgaaggaaaagcctaaccacgataaagtaaataagctctga

SEQ ID NO: 206 - protein, 710 aa, Ogataea polymorpha
MSMRIPKAASVNDEQHQRIIKYGRALVLDIVEQYGGGHPGSAMGAMAIGIALWKYTLKYAPNDPNYFNRDRFVLSNGHVCLFQYIFQHLYGLKSMTMAQLKSYHSNDFHSLCPGHPEIEHDAVEVTTGPLGQGISNSVGLAIATKNLAATYNKPGFDIITNKVYCMVGDACLQEGPALESISLAGHMGLDNLIVLYDNNQVCCDGSVDIANTEDISAKFKACNWNVIEVENASEDVATIVKALEYAQAEKHRPTLINCRTVIGSGAAFENHCAAHGNALGEDGVRELKIKYGMNPAQKFYIPQDVYDFFKEKPAEGDKLVAEWKSLVAKYVKAYPEEGQEFLARMRGELPKNWKSFLPQQEFTGDAPTRAAARELVRALGQNCKSVIAGCADLSVSVNLQWPGVKYFMDPSLSTQCGLSGDYSGRYIEYGIREHAMCAIANGLAAYNKGTFLPITSTFFMFYLYAAPAIRMAGLQELKAIHIGTHDSINEGENGPTHQPVESPALFRAMPNIYYMRPVDSAEVFGLFQKAVELPFSSILSLSRNEVLQYPGKSSAEKAQRGGYILEDAENAEVQIIGVGAEMEFAYKAAKILGRKFRTRVLSIPCTRLFDEQSIGYRRSVLRKDGRQVPTVVVDGHVAFGWERYATASYCMNTYGKSLPPEVIYEYFGYNPATIAKKVEAYVRACQRDPLLLHDFLDLKEKPNHDKVNKL

SEQ ID NO: 207 - DNA, 1776 bp, Saccharomyces cerevisiae
atgtcccataagcaattcaagagcgacggtaacatcgttacaccttaccttctaggattagctagaagtaaccctggcctcaccgtgatcaaacacgacagagtcgtctttcgtacggcaagtgctcccaattctggtaatccacctaaagtcagtttggtttctggtggtgggagtggccatgagccgactcacgccggattcgttggagaaggtgctctcgatgctattgccgctggtgcaatattcgcatctcctagtacaaagcaaatctacagtgccatcaaagccgttgaatctccaaaaggtacccttattatagtgaagaattatacgggagacattattcattttggactagcagcggaaagagctaaagcggctggtatgaaggttgaacttgtcgcagtcggggacgacgtatcagttggcaagaagaagggatcgctagtcggccgacgtgggctgggagcgacggtgcttgtacacaaaatagctggggctgccgcgtctcacggattggagctcgctgaggtcgcagaagtggcccaaagtgtagttgataactctgtaaccatcgcggcgtctctggaccattgtacggtacctggtcacaaaccagaagctatcctaggtgagaatgagtacgaaataggaatgggaatacataacgagagtggaacatataagtccagcccacttccaagcatctccgagctagtatcccaaatgctcccattgttgttagatgaggacgaggacaggagctacgtgaagtttgagcccaaagaggatgtggtcttgatggttaacaacatgggcggcatgtccaacctcgaattagggtatgctgccgaagtcatttctgagcaattaatcgacaaatatcagatagtccctaagcggaccatcaccggggcgttcattacagctctcaatggtcccggttttgggataacactaatgaatgcatccaaggctggtggtgatatactcaaatatttcgactaccccactacagctagtggatggaaccagatgtatcactcggcaaaagactgggaagttcttgcaaagggacaagtacccactgctccaagtttgaaaacattaagaaacgagaaaggatcaggcgtgaaagctgactatgacaccttcgccaaaattttactcgctggtatagcaaagattaatgaagttgagcctaaggtcacctggtatgacactattgcaggggacggtgactgtggcaccacgcttgttagcggtggagaagcgttagaggaagctatcaagaaccacaccttaaggcttgaggacgcagctttgggaatcgaagatatagcctacatggttgaggactcaatgggcggcacttcaggtgggctctattccatttatctatccgcattggctcaaggtgttagagactcaggcgacaaagagttgacagcggagactttcaagaaggcttcaaatgtagcactagacgctctctacaaatataccagagcgcgaccaggctaccgtacgttaatcgatgccttacaaccgttcgttgaagcccttaaggctggtaaaggtcctcgggctgctgcacaagcagcatatgatggggcagaaaagaccaggaagatggacgcgttagtcgggcgtgcctcttatgtggctaaagaggagttgcgtaagcttgatagtgagggtggactcccagatcctggagccgtgggacttgcagcacttctcgatggatttgtgacagcggcaggctattag

SEQ ID NO: 208 - protein, 591 aa, Saccharomyces cerevisiae
MSHKQFKSDGNIVTPYLLGLARSNPGLTVIKHDRVVFRTASAPNSGNPPKVSLVSGGGSGHEPTHAGFVGEGALDAIAAGAIFASPSTKQIYSAIKAVESPKGTLIIVKNYTGDIIHFGLAAERAKAAGMKVELVAVGDDVSVGKKKGSLVGRRGLGATVLVHKIAGAAASHGLELAEVAEVAQSVVDNSVTIAASLDHCTVPGHKPEAILGENEYEIGMGIHNESGTYKSSPLPSISELVSQMLPLLLDEDEDRSYVKFEPKEDVVLMVNNMGGMSNLELGYAAEVISEQLIDKYQIVPKRTITGAFITALNGPGFGITLMNASKAGGDILKYFDYPTTASGWNQMYHSAKDWEVLAKGQVPTAPSLKTLRNEKGSGVKADYDTFAKILLAGIAKINEVEPKVTWYDTIAGDGDCGTTLVSGGEALEEAIKNHTLRLEDAALGIEDIAYMVEDSMGGTSGGLYSIYLSALAQGVRDSGDKELTAETFKKASNVALDALYKYTRARPGYRTLIDALQPFVEALKAGKGPRAAAQAAYDGAEKTRKMDALVGRASYVAKEELRKLDSEGGLPDPGAVGLAALLDGFVTAAGY

SEQ ID NO: 209 - DNA, 1827 bp, Komagataella phaffii
atgagttcaaaacattgggattacaagaaggaccttgttcttagtcacctggcgggtttatgccagtccaacccacatgttaggctgatcgaatccgagagggtggtaatctccgctgaaaatcaggaagataagataacattgatcagtggtggtggttcaggccatgagcctttacatgccggtttcgtgaccaaggacggacttttagacgccgctgtggcgggtttcattttcgcctctcccagcactaagcagatattctctgcaatcaaagcgaaaccttctaagaaaggaacactgatcatcgtgaagaactacactggggacatattgcattttggcctagcagccgagaaagcgaaagctgaagggcttaatgcggaactcctcatcgtccaagacgatgtgagcgttggcaaggctaagaacgggcttgtcggtagaagaggtttggctggtacctcactggttcacaagattctaggggccaaagcttacttacaaaaggataacttggagttgcaccagctagttacatttggtgagaaagttgtcgctaacctcgtaacgatcggagcgagtcttgaccatgtcacaattccagcccgagctaacaagcaggaagaggacgactctgacgatgagcatgggtacgaagtactaaaacacgacgaatttgagattggtatgggtatacataatgagcccggtattaagaaatcatcacccatacccaccgttgacgaacttgtcgcggaattgctcgaatatctactttctaccacagacaaagataggaattacgttcaattcgataagaacgatgaggtggtgttgcttatcaacaacctgggcgggacatctgtgcttgagctctacgctatccagaatatcgttgttgaccaattggcgtccaaatactctatcaagccagtgagaatatttacaggcacctttactacctctttggacggaccaggattttcaattacgcttttgaacgctacaaagacaggagacaaggacatcttgaagtttctcgatcataaaacgtccgcacctggatggaactctaacatctcggactggtccggtagagtagacaatttcatagtagccgcgccagaaatcgatgagggagatagctctagtaaagtttctgtggatgctaagctttatgcggacctgcttgagtccggtgtgaagaaagtgatttcaaaagaacccaaaatcactctctacgataccgttgctggagatggtgactgtggagaaacattggcaaacgggagtaacgctatactaaaagctttagctgaggggaaattggatctcaaggacggggtcaagtcccttgtacagattaccgacatagtggaaacagcgatgggcgggacttccggtggcctttactcaattttcataagtgcattggcaaagagcttgaaagagaaggaactctctgagggagcctacaccctgacacttgagactatatcaggctctctccaggctgctctccagtcacttttcaaatacactagagcaagaacaggggatcgaacgctgatagatgcccttgagccatttgtaaaagaattcgcaaaatcaaaagatttaaaactggcaaacaaagccgctcacgacggagcagaagcgaccagaaaacttgaagcgaaatttggtagagcttcgtacgtggctgaggaagaattcaagcaatttgagtctgagggtggactccctgacccaggagcaattgggctggccgctttaatttccggtatcactgacgcctatttcaagtcggaaacgaagctctag

SEQ ID NO: 210 - protein, 608 aa, Komagataella phaffii
MSSKHWDYKKDLVLSHLAGLCQSNPHVRLIESERVVISAENQEDKITLISGGGSGHEPLHAGFVTKDGLLDAAVAGFIFASPSTKQIFSAIKAKPSKKGTLIIVKNYTGDILHFGLAAEKAKAEGLNAELLIVQDDVSVGKAKNGLVGRRGLAGTSLVHKILGAKAYLQKDNLELHQLVTFGEKVVANLVTIGASLDHVTIPARANKQEEDDSDDEHGYEVLKHDEFEIGMGIHNEPGIKKSSPIPTVDELVAELLEYLLSTTDKDRNYVQFDKNDEVVLLINNLGGTSVLELYAIQNIVVDQLASKYSIKPVRIFTGTFTTSLDGPGFSITLLNATKTGDKDILKFLDHKTSAPGWNSNISDWSGRVDNFIVAAPEIDEGDSSSKVSVDAKLYADLLESGVKKVISKEPKITLYDTVAGDGDCGETLANGSNAILKALAEGKLDLKDGVKSLVQITDIVETAMGGTSGGLYSIFISALAKSLKEKELSEGAYTLTLETISGSLQAALQSLFKYTRARTGDRTLIDALEPFVKEFAKSKDLKLANKAAHDGAEATRKLEAKFGRASYVAEEEFKQFESEGGLPDPGAIGLAALISGITDAYFKSETKL

SEQ ID NO: 211 - DNA, 1071 bp, Escherichia coli
atgaaaaaattgatcaatgatgtgcaagacgtactggacgaacaactggcaggactggcgaaagcgcatccatcgctgacactgcatcaggatccggtgtatgtcacccgagctgatgcccctgttgcaggaaaagtcgccctgctgtcgggtggcggcagcggacacgagccgatgcactgtgggtatatcggtcaggggatgctttcgggggcctgtccgggcgaaattttcacctcaccgacgcccgataaaatctttgaatgcgccatgcaagttgatggcggcgaaggtgtactgttgattatcaaaaattacaccggcgatattcttaactttgaaacagcgaccgagttactgcacgatagcggcgtaaaagtgaccactgtggtcattgatgacgacgttgcggtaaaagacagtctttatactgccgggcgacgcggcgttgccaacaccgtattaattgaaaaactcgtaggcgcagcggcggagcgtggcgactcactggacgcctgtgcggaactggggcgtaagctgaataatcaaggccactcaataggtatcgctctcggtgcctgtaccgttcctgccgcgggcaaaccttcttttaccctggcggataatgagatggagtttggcgtcggcattcatggtgagccgggtattgaccgccgccccttctcttcccttgatcaaaccgtcgatgaaatgttcgacaccctgctggtaaatggctcataccatcgcactttgcgtttctgggattatcaacaaggcagttggcaggaagaacaacaaaccaaacaaccgctccagtctggcgatcgggtgattgcgctggttaacaatcttggcgcaactccgctttctgagctgtacggcatctataaccgcctgaccacacgttgccagcaagcgggattgactatcgaacgtaatttaattggcgcgtactgcacctcactggatatgaccggtttctcaatcaccttactgaaagttgatgacgaaacgctggcactctgggacgccccggtccacaccccggcccttaactggggtaaataa

SEQ ID NO: 212 - protein, 356 aa, Escherichia coli
MKKLINDVQDVLDEQLAGLAKAHPSLTLHQDPVYVTRADAPVAGKVALLSGGGSGHEPMHCGYIGQGMLSGACPGEIFTSPTPDKIFECAMQVDGGEGVLLIIKNYTGDILNFETATELLHDSGVKVTTVVIDDDVAVKDSLYTAGRRGVANTVLIEKLVGAAAERGDSLDACAELGRKLNNQGHSIGIALGACTVPAAGKPSFTLADNEMEFGVGIHGEPGIDRRPFSSLDQTVDEMFDTLLVNGSYHRTLRFWDYQQGSWQEEQQTKQPLQSGDRVIALVNNLGATPLSELYGIYNRLTTRCQQAGLTIERNLIGAYCTSLDMTGFSITLLKVDDETLALWDAPVHTPALNWGK

SEQ ID NO: 213 - DNA, 1659 bp, Citrobacter freundii
atgtctcaattcttcttcaatcaaagaacacaccttgtatctgacgttattgacgggaccattatagcatcaccttggaataacttggccaggctagagagcgatccagcgattaggatagtcgtgagacgtgatttgaataagaacaacgttgctgttatcagtggaggagggtctggacatgagccagctcatgtaggtttcatagggaaaggaatgctaactgccgctgtttgcggagacgtgttcgcttcaccaagtgtcgacgccgttctaacggcgattcaggcagtcacaggtgaggcaggatgtctcctaattgtcaagaattacaccggagacagacttaatttcggtttggctgcagagaaggctcgtagactgggctataacgtcgagatgctaatagtgggcgacgatatttcattaccagataacaagcaccctagagggatcgcgggtaccatattagttcacaagatcgcagggtacttcgcagaaagaggatataatctagcgactgttttgcgagaggcacagtacgcggctaacaatacttttagtcttggggtagcgttgtcctcatgtcatctccctcaagaggcggacgccgcgcctaggcatcacccaggacacgcagaacttggcatgggcatacacggcgagccgggagcgtctgttatcgatacgcaaaattcagctcaggttgttaatctgatggttgacaaactcatggctgcgttaccggaaacagggcgactcgcagtcatgataaataacctgggtggtgtgagcgtagctgaaatggcgatcatcacacgggagctggcttcttcacctcttcacccaaggatcgactggctcatagggccagcaagcttggttaccgcattagatatgaaatctttcagcttaacagcaatcgtactagaggaaagcattgagaaagcacttctcacagaggtggagacatcaaattggccaacgccggtgccccctagagaaatttcgtgcgtgccttcaagtcagcggagtgctcgtgttgaatttcagccctcagcgaacgctatggttgcagggattgtagaactggtgactacaactttatcggacctcgaaacacacttaaatgccttggacgccaaagttggagacggcgatacgggatcaaccttcgctgcaggggcgcgggaaatagcaagtctcttgcaccgacaacagctcccgttagataatttggctacactcttcgcattgatcggagaacgtctcacagtagtaatgggtggttccagtggggttttaatgtcgatcttcttcactgctgcaggtcaaaagctcgaacaaggagcatcggtggctgaaagtctgaacaccggattagcacagatgaaattctacggtggagccgatgagggtgatcgtactatgatcgatgcgctgcagcccgcattaacttcgctcttaacgcagccacaaaatcttcaggcagctttcgacgctgcccaagcaggggcggaacgtacctgtttgagctctaaggctaatgcgggacgtgcgtcatatctttcatcggagagtctccttggtaacatggaccccggagcacacgcagtagctatggtgtttaaggccttagcggagtctgagctcggatag

SEQ ID NO: 214 - protein, 552 aa, Citrobacter freundii
MSQFFFNQRTHLVSDVIDGTIIASPWNNLARLESDPAIRIVVRRDLNKNNVAVISGGGSGHEPAHVGFIGKGMLTAAVCGDVFASPSVDAVLTAIQAVTGEAGCLLIVKNYTGDRLNFGLAAEKARRLGYNVEMLIVGDDISLPDNKHPRGIAGTILVHKIAGYFAERGYNLATVLREAQYAANNTFSLGVALSSCHLPQEADAAPRHHPGHAELGMGIHGEPGASVIDTQNSAQVVNLMVDKLMAALPETGRLAVMINNLGGVSVAEMAIITRELASSPLHPRIDWLIGPASLVTALDMKSFSLTAIVLEESIEKALLTEVETSNWPTPVPPREISCVPSSQRSARVEFQPSANAMVAGIVELVTTTLSDLETHLNALDAKVGDGDTGSTFAAGAREIASLLHRQQLPLDNLATLFALIGERLTVVMGGSSGVLMSIFFTAAGQKLEQGASVAESLNTGLAQMKFYGGADEGDRTMIDALQPALTSLLTQPQNLQAAFDAAQAGAERTCLSSKANAGRASYLSSESLLGNMDPGAHAVAMVFKALAESELG

SEQ ID NO: 215 - DNA, 1206 bp, Methylobacterium sp.
atggccgctaacggaaacagggtcgttacttttcagggtcctatgaaaatggaactaaagactttcgattttcctaaattggtcacaccaactgggaagaaagcaaatcacggggctattttgaaaatagtgaccaccaacatttgcggatctgaccagcacatttatcacggtcggttcgccgcaccaaaagggatggttatgggacacgaaatgacgggcgaagttattgaggtcgggtctgatgttgagtttattagagtgggtgacttatgcagtgtaccgtttaatgtatcctgcgggcggtgcaggaactgcaaagaaaggcacactgatgtatgtatgaatgttaatgatgaggtagactgcggcgcgtatggattcaatctcggtggatggcaaggtgggcagtccgactacctcatggtaccttacgcggattggaaccttctctcgttcccggacaaggaccaagcaatggagaagattagagatctgacattgttgtctgacatacttcctaccggtttccacggtcttatggccgcaggcgctaaagctggatcgactgtgtatatcgctggagctgggcctgtcggcaggtgcgcagctgctggggcaagattgattggggcgtcctgtatcatcgttgccgacacgaaccgagctaggttggacttggttaagaacaatggttgcgaggtggtcgacctcacgaagggtacacctgtacctgaccaaatagaggcgatcctcggtaagagagaagttgattgtggtgtggattgtgttggcctcgaagcacatggtaatggacctgaggctaacaaggagcattcagaagctgttataaacacgcttttccaagtcgtgagagcaggtggggcgatgggagttcctggaatctatacagctgcggacccgaaggcatcttcagaattgacaaagaaaggacagttgcctatagactttggaaaggcatggattaagtctccaaagttgacagcaggtcaggcccctataatgcactataatcgggatctgatgatggctatattgtgggacaggatgccatacctgggagcaatgctcaacacagaagtaattactttagagcaagcaccagccgcttataagacgttctcagacggtagtcctaagaagtttgttatcgacccccacgggtccgttaagaaggcatcgtag

SEQ ID NO: 216 - protein, 401 aa, Methylobacterium sp.
MAANGNRVVTFQGPMKMELKTFDFPKLVTPTGKKANHGAILKIVTTNICGSDQHIYHGRFAAPKGMVMGHEMTGEVIEVGSDVEFIRVGDLCSVPFNVSCGRCRNCKERHTDVCMNVNDEVDCGAYGFNLGGWQGGQSDYLMVPYADWNLLSFPDKDQAMEKIRDLTLLSDILPTGFHGLMAAGAKAGSTVYIAGAGPVGRCAAAGARLIGASCIIVADTNRARLDLVKNNGCEVVDLTKGTPVPDQIEAILGKREVDCGVDCVGLEAHGNGPEANKEHSEAVINTLFQVVRAGGAMGVPGIYTAADPKASSELTKKGQLPIDFGKAWIKSPKLTAGQAPIMHYNRDLMMAILWDRMPYLGAMLNTEVITLEQAPAAYKTFSDGSPKKFVIDPHGSVKKAS

SEQ ID NO: 217 - DNA, 1200 bp, Pseudomonas sp. 101
atgagtggtaaccgaggcgtagtgtacttgggttcaggaaaggtagaagtccagaagattgattatccaaagatgcaggaccctaggggtaagaaaatcgagcacggcgtaatactgaaagtagtgtccaccaacatttgcggttctgaccagcatatggtaagagggcgaactacagcgcaggtaggtttggttctcgggcacgaaataactggtgaggttatagagaaaggtagagatgttgaaaatctgcagataggagatcttgtctcggtgccattcaacgtggcttgtgggcggtgcaggagttgcaaggaaatgcacacaggggtctgccttactgttaatccagcgcgagctggcggggcgtatggttacgttgacatgggtgactggactggtggacaagcagaataccttctcgtcccatacgcggacttcaacttactcaaattgccggaccgtgacaaggctatggaaaagataagggacctcacctgcctatcagacatactgccgacaggatatcatggtgcagtcactgctggagtaggtccaggctcgacagtttacgttgcgggtgcaggaccggtgggtcttgctgctgcagcgtcggcgagactgttgggagcagcagttgttatagttggcgatttgaacccggccagactcgcgcatgctaaagcgcaaggttttgaaatagcggacctctcattggacaccccgttacatgagcagattgcagcactcctgggtgaaccagaagttgattgcgcggtcgatgctgttggattcgaagctagaggacacggtcacgaaggagcaaaacatgaggcacccgctacagtactaaatagtctaatgcaagttaccagagttgcggggaagataggtatcccaggattatacgtgactgaagatccaggtgcagtggacgcagcagccaagatcggttctctaagtatccgatttggtttgggatgggccaaatcgcattcttttcacacggggcaaacccctgtaatgaagtataatcgggccttgatgcaagctattatgtgggatcgtataaacatcgctgaggtcgtaggagtccaagtaatcagtcttgacgacgctccacgagggtatggagagttcgacgctggggtgcctaagaaatttgttatcgaccctcacaaaacattttcggcagcttag

SEQ ID NO: 218 - protein, 399 aa, Pseudomonas sp. 101
MSGNRGVVYLGSGKVEVQKIDYPKMQDPRGKKIEHGVILKVVSTNICGSDQHMVRGRTTAQVGLVLGHEITGEVIEKGRDVENLQIGDLVSVPFNVACGRCRSCKEMHTGVCLTVNPARAGGAYGYVDMGDWTGGQAEYVLVPYADFNLLKLPDRDKAMEKIRDLTCLSDILPTGYHGAVTAGVGPGSTVYVAGAGPVGLAAAASARLLGAAVVIVGDLNPARLAHAKAQGFEIADLSLDTPLHEQIAALLGEPEVDCAVDAVGFEARGHGHEGAKHEAPATVLNSLMQVTRVAGKIGIPGLYVTEDPGAVDAAAKIGSLSIRFGLGWAKSHSFHTGQTPVMKYNRALMQAIMWDRINIAEVVGVQVISLDDAPRGYGEFDAGVPKKFVIDPHKTFSAA

SEQ ID NO: 219 - DNA, 1139 bp, Epipremnum Aureum
atggctactaagcgcaagtcataacatgtaaagccgctgttgcgtgggaagccaataaacccctagcgatcgaggatgtcctcgttgcaccacctcaagccggagaagtccgcattaaaatcctttttaccgctttgtgtcataccgatgcgtatacgtggagcgggaaggatcctgaagggctgtttccatgtattttgggacatgaagccgcagggatagtggaatcggtcggagagggagtcaccgaagttcaaccaggtgaccatgtaatcccatgctatcaggctgaatgtagggagtgcaaattttgcaaatcaggtaagactaatttatgtggtaaagttcgtgcagctacgggcgttggaattatgatgaatgatagaaagagcagattttctataaatggtaaaccaatttatcactttatggggacgagtacgttttcacaatataccgtagttcatgatgtttctgttgccaaaattgatcccaaagcaccactcgagaaggtttgtctacttgggtgtggtgttgcaacagggttgggagcagtatggaacacagccaaagtcgaggctggctccatcgtagccatatttggtcttggaactgtaggtttggccgtagctgaaggagcaaaaaccgcaggagcgagccgaataattggaatagatattgacagcaagaaattcgacgtagccaaaaattttggagttacagagtttgttaacccaaaagattatgagaaaccgatccagcaagttttggtagacctcactgacggaggcgtggactattcctttgaatgcataggaaacgtatcagttatgcgagccgcattagaatgctgtcacaaggggtgggggacgagcgttatcgtcggggttgctgcatcagggcaagagatttccactagaccatttcagttggtcaccggccgagtgtggaaaggtacagcatttggagggtttaagtcccgcagccaggtcccctggctggtagataagtatatgaagaaagagatcaaagtggatgagtacattacacataatctgacattgggagaaataaacaaaggtttcgactttatgcatgaagggagctgtctcagatgtgtgttagatactcaagtataa

SEQ ID NO: 220 - protein, 379 aa, Pseudomonas sp. 101
MATEAQVITCKAAVAWEANKPLAIEDVLVAPPQAGEVRIKILFTALCHTDAYTWSGKDPEGLFPCILGHEAAGIVESVGEGVTEVQPGDHVIPCYQAECRECKFCKSGKTNLCGKVRAATGVGIMMNDRKSRFSINGKPIYHFMGTSTFSQYTVVHDVSVAKIDPKAPLEKVCLLGCGVATGLGAVWNTAKVEAGSIVAIFGLGTVGLAVAEGAKTAGASRIIGIDIDSKKFDVAKNFGVTEFVNPKDYEKPIQQVLVDLTDGGVDYSFECIGNVSVMRAALECCHKGWGTSVIVGVAASGQEISTRPFQLVTGRVWKGTAFGGFKSRSQVPWLVDKYMKKEIKVDEYITHNLTLGEINKGFDFMHEGSCLRCVLDTQV

SEQ ID NO: 221 - DNA, 1176 bp, Methylobacterium sp.
atgaaggcactgtgctggcacggccgcaacgatatccgctgcgacacggtcccggacccggtcatcgaggattcccgcgacgtgatcatcaaggtcacgagctgcgcgatctgcggctcggacctacatctgatggacggccagatgccgaccatgaagagcggcgacgtcctcggccacgaattcatgggcgagatcgtggaggtcgggaccggcttcaccaagttcaaaaagggcgatcggatcgtcgtgcccttcaacatcaactgcggcgcatgccgccagtgcaagctcggcaattactcggtctgcgagcgctcaaaccgcaacgccgagatggcggccgcgcagttcggctacacgacggccggcctgttcggatactcgcacctgaccggcggctatgccggtggccaggccgagtatgtccgtgtgccgatggccgacgtcgcgccaatgaaggtgccggaaggcatggacgacgaatccgtcctgttcctcaccgacatcctgcccaccggctggcagggcgcggagcattgcgagatccagggcggcgagacgattgcggtctggggcgccggcccggtcggcatcttcgcgatccaatcggcgaagatcatgggggccgagcggatcatcgccatcgagaccgtgcccgagcgcatcgccctcgcccggaaggccggcgccaccgacatcatcgacttcatgaacgaggacgtgttcgagcgaatcaaggagatcaccaagggccagggtgccgacggcgtgatcgactgcgtcggcatggaggcgagtgccggccatggcggcctcactggcgtgctctccgccgtccaggagaagctgaccgccaccgagcggccctacgcgctggccgaagccatcaaggcggtccggccctgtgggatcgtctcggtgcccggcgtctatggcggaccgatcccggtcaacatgggctcgatcgtccagaagggcctgaccctcaagagcggccagacccatgtgaagcgctatctcgagccgctgaccaagctgatccaagagggcaagatcgacatgacctccctgatcacccaccgctcgcacgacctcgcggatgggccggacctctacaaggccttccgcgacaagaaggacggctgcgtgaaggtggtgtttcacctgaactga

SEQ ID NO: 222 - protein, 391 aa, Methylobacterium sp.
MKALCWHGRNDIRCDTVPDPVIEDSRDVIIKVTSCAICGSDLHLMDGQMPTMKSGDVLGHEFMGEIVEVGTGFTKFKKGDRIVVPFNINCGACRQCKLGNYSVCERSNRNAEMAAAQFGYTTAGLFGYSHLTGGYAGGQAEYVRVPMADVAPMKVPEGMDDESVLFLTDILPTGWQGAEHCEIQGGETIAVWGAGPVGIFAIQSAKIMGAERIIAIETVPERIALARKAGATDIIDFMNEDVFERIKEITKGQGADGVIDCVGMEASAGHGGLTGVLSAVQEKLTATERPYALAEAIKAVRPCGIVSVPGVYGGPIPVNMGSIVQKGLTLKSGQTHVKRYLEPLTKLIQEGKIDMTSLITHRSHDLADGPDLYKAFRDKKDGCVKVVFHLN

SEQ ID NO: 223 - DNA, 1176 bp, Methylobacterium sp.
atgaaagctcttacttggcaaagtcgagggaaaattacttgtgaaacagtccctgaccctaaaatcgagcacgggcgagatgtgatcattaaagtaacggcttgtgctatctgtggtagtgatctacacctcatgggtgggtttatgccgactatgaaatgcggagatatccttggacatgagacaatgggagaggtcatagaggttggtaaggacaaccataagcttaaagttggtgaccgtatagtcgttccgttcacaatctgttgcggagaatgccggcaatgcaaatggggtaactggagctgctgcgaacggactaaccctaacggcaaactgcaagctgagacatacggttatcctctcgccgggttgttcggattttcacacatcacaggcggtttcgctggcgggcaagcagagtatttaagagtgccttatgcagatgtggggcccattgtcgtaccagaaggactcacggacgagcaagtcctgtttctttcagacatatttcctactgcttaccaggccgcagagcattgcgacatcgggccagaggatacagtcgccatttggggttgcggtccagtaggggtgctcgctgtgaagtgttgctatctacttggagcaaagagagttattgcaattgattcagtgccggagaggcttgcgctcgcacgagaagctggtgctgagacaatcgatctttcatctcaaaatgtccaggacaccctcatggagatgacacacggacttggtcctgactccgtcatcgaggcagtcgggatggaaagccacggtgctgacacaacacttcaaaaggtatcttctgctatcatggagcacactgtttcgttagaaaggccatttgcgctcaaccaagctatcctcgcctgcaggcctggcggtaatgtctctatgccaggggttttcgcgggtcctgtgggaccagtcgcactaggagtgctgatgaataagggactcactcttaaaaccggccagacacatatggtgcggtatatgaagcctctattagagaggattcagaagggtgagatagacccatcatttatcgtgtcccatcgatcgacaaacttggaagaaggtcccgcactttacgaggcctttcgagataaaaccgacaattgcaccaaagtggtgtttaaaccccattag

SEQ ID NO: 224 - protein, 392 aa, Methylobacterium sp.
MKALTWQSRGKITCETVPDPKIEHGRDVIIKVTACAICGSDLHLMGGFMPTMKCGDILGHETMGEVIEVGKDNHKLKVGDRIVVPFTICCGECRQCKWGNWSCCERTNPNGKLQAETYGYPLAGLFGFSHITGGFAGGQAEYLRVPYADVGPIVVPEGLTDEQVLFLSDIFPTAYQAAEHCDIGPEDTVAIWGCGPVGVLAVKCCYLLGAKRVIAIDSVPERLALAREAGAETIDLSSQNVQDTLMEMTHGLGPDSVIEAVGMESHGADTTLQKVSSAIMEHTVSLERPFALNQAILACRPGGNVSMPGVFAGPVGPVALGVLMNKGLTLKTGQTHMVRYMKPLLERIQKGEIDPSFIVSHRSTNLEEGPALYEAFRDKTDNCTKVVFKPHG

SEQ ID NO: 225 - DNA, 1560 bp, Methylobacterium sp.
atgagcgtgactctctatattcctcgggatgcagtggccttgggtcttggtgcgaacaaggtagctagagcgttgttcgcaggagctgaacgtcggggtctagatgtaaccatcgtgcgaacaggaagtcgaggacttttctggttagagccaatggttgaggtgggaacaccagagggaagagtagcgtatggacccgtaaagctggcagacatagacgctcttcttgatgctgggctcgcaaccggcggagatcatccactacgattaggtgaccctgaaaagatcccttacttagctcggcaacaacggttaacctttcacaggtgcggtgttattgatcctgttagtgtggacgattatcgtgcccatggtggttatcgaggcctagaagcagctctcaaactcgatgctgaaggtatcgtagcggcagtaagggactccggactccgtggacggggtggtgcaggcttcccagccggaattaaatggaatacggttatgctagctaaagctgaccagaagtatgtagtttgtaacgcagacgagggtgactcaggtacttttgcagacagaatgatgatggaaggagatccctttaatctaatcgaaggcatgaccatcgcagccgtcgctactggagcaaccagaggatacatataccttaggtcggaatatccacaggcctttgcaacactgaaggaagctatcgcgaacggagtgactgcaggagtcctcggtgagaatatattaggatcagggaaaacttttcacttagaggtgagattaggagccggtgcgtacatttgcggtgaagagacgtcactacttgagtctctagagggtaagagaggaatcgtccgtgctaaaccacctattccagctctcaaaggattcttaggtaaaccgacgttggtaaataacgtaatgacctttacagcagttccttggatattggagaatggagcaaaggcgtatgcggattacggcatgggacgtagtttgggcaccttgccgattcaactcgcaggtaacatcaaacacggtggtttgatcgaaatggcctttggaatcactttgcgtcaggtcatcgaggactttggaggaggtacacggtctggtcgtccagtgcgtgccgtgcaagtaggtggtccactgggcgcctattttccagatcacctcttagacaccccgctcgactacgaggcaatggcagcaaagaaaggcctggttggacacggtggcatcgttgtctttgatgacacggttgacatggcagcgcaagcgcgatttgcctttgagttctgcgctaccgaatcttgtggaaaatgcacaccgtgcagaatcggtgcgacacgaggggtcgaaacaatggataaggtgatagcaggaatccgaccagacgcgaacctcaaactcgttgaggatttgtgcgaggtaatgacagatggttctctgtgtgctatgggtgggctcacgcctatgccagttatgagcgcaatcacccactttccggaagatttccgtcgagccggagacttgccggctgcagccgagtaa

SEQ ID NO: 226 - protein, 519 aa, Methylobacterium sp.
MSVTLYIPRDAVALGLGANKVARALFAGAERRGLDVTIVRTGSRGLFWLEPMVEVGTPEGRVAYGPVKLADIDALLDAGLATGGDHPLRLGDPEKIPYLARQQRLTFHRCGVIDPVSVDDYRAHGGYRGLEAALKLDAEGIVAAVRDSGLRGRGGAGFPAGIKWNTVMLAKADQKYVVCNADEGDSGTFADRMMMEGDPFNLIEGMTIAAVATGATRGYIYLRSEYPQAFATLKEAIANGVTAGVLGENILGSGKTFHLEVRLGAGAYICGEETSLLESLEGKRGIVRAKPPIPALKGFLGKPTLVNNVMTFTAVPWILENGAKAYADYGMGRSLGTLPIQLAGNIKHGGLIEMAFGITLRQVIEDFGGGTRSGRPVRAVQVGGPLGAYFPDHLLDTPLDYEAMAAKKGLVGHGGIVVFDDTVDMAAQARFAFEFCATESCGKCTPCRIGATRGVETMDKVIAGIRPDANLKLVEDLCEVMTDGSLCAMGGLTPMPVMSAITHFPEDFRRAGDLPAAAE

SEQ ID NO: 227 - protein, 990 aa, Methylobacterium sp.
MSNAPEQHGDKTEKSEIRADGLQDAGGPAQGPKPEAGGSYSEGAKAGGQAAPEPSGLHDLKGRPTAPPTIAFELDGQQVEAAPGETIWAVAKRLGTHIPHLCHKPEPGYRPDGNCRACMVEIEGERVLAASCKRTPAVGMKVKTATERATKARAMVLELLVADQPERETSHDPTSHFWVQADFLDVSESRFPAAERWTGDFSHPAMSVNLDACIQCNLCVRACREVQVNDVIGMAYRSAGAKVVFDFDDPMGGSTCVACGECVQACPTGALMPSAYLDAEHKTRTVYPDREVTSLCPYCGVGCQVSYKVKDEKIVYAEGVNGPANHNRLCVKGRFGFDYVHHPHRLTAPLIRLDNIPKDANDQVDPANPWTHFREATWEEALDRAAGGLKTVRDTHGRKALAGFGSAKGSNEEAYLFQKLVRLGFGSNNVDHCTRLCHASSVAALMEGLNSGAVSAPFSAALDAEVIIVIGANPTVNHPVAATFLKNAVKQRGAKLIVMDPRRQVLSRHAYKHLAFKPGSDVAMLNAMLNVIIEERLYDEQYIAGYTENFEALKEKIVEFTPEKMASVCGIDAETLREVARLYARAKSSIIFWGMGISQHVHGTDNSRCLIALALVTGQIGRPGTGLHPLRGQNNVQGASDAGLIPMVYPDYQSVEKAAVREMFEEFWGQKLDPQRGLTVVEIMRAIHAGEIKGMFVEGENPAMSDPDLNHARHALAMLDHLVVQDLFLTETAFHADVVLPASAFAEKAGTFTNTDRRVQISQPVVSPPGDARQDWWIIQELGKPLGLPWNYGGPADIFREMAMVMPSFNNITWERLEREGAVTYPVDAPDKPGNEIIFYAGFPTESGRAKIVPAAVVPPDELPDEDYPMVLSTGRVLEPWHTGSMTRRAGVLDALEPEAVAFMAPKELYRLGLEPGDTMKLETRRGAVHLKVRSDRDVPVGMIFMPFCYAEAAANLLTNPALDPMGKIPEFKFCAARASAVHATPMAAE

SEQ ID NO: 228 - protein, 811 aa, Methylobacterium sp.
MTNLWMDIKHADVITVMGGNAAEAHPCGFKWVVEAKAHNNAKLIVVDPRFTRTASVADLYCPIRQGTDIAFLSGVAKYLLDNDKLQHRYVSAYTNAGYVVREGYDFSEGLFAGYDADKRDYDKTTWDYEIGPDGYAVVDETLQHPRCVMQLLKKHVALYTPEMVEKICGSPKDTFLKVCELIATTAAPDRVMTSLYALGWTHHSKGSQNIRSMCIVQTLLGNIGMLGGGMNALRGHSNIQGLTDIGLMSNLIPGYLNIPVEKEPDYASYIAKRQFKPLRPGQTSYWQNYNKFFVSFQKAMWGDKAQKENDWAYDYLPKLDVPTYDVLRGFELAKQGKMTGYVIQGFNPLLSFPNRAKMTEAFSKMKFLVVMDPLKTETARFWENHGEYNDVDPTKIQTEVFELPTTLFVEEEGSLSNSSRWLQWHWQAQDAPGECRSDIEIMSEIFLRIRGAYKKDGGAFSDPIVNLKWDYAIAESPTPTELARELNGYTLAPTPDLNGTVIPAGKQVDGFAQLKDDGTTACGCWIYSGCYTEKGNMMARRDNTDPGDRGIAPNWAFAWPANRRVLYNRASCDPEGRPWSEKKKLIEWNGKQWIGFDVPDYGVTVAPDKGVGPFILNQEGVARLWTRGLMRDGPFPTHYEPFESPVQNVAFPKIKGAPAARIFKDDLADLGDAKDFPYAATSYRLTEHFHGWTKHARINAILQPEAFVEISEELAKEKGIAKGGWVRVWSKRGSLKAKAVVTKRIKPLICDGKPVHVVGIPQHWGFMGHTKKGWHPNSLTPVVGDANTETPEFKAWLVNIEPTTPPSDAVA

SEQ ID NO: 229 - protein, 157 aa, Methylobacterium sp.
MARHEPWSAERASKIIAEHTHLEGATLPILHALQETFGYVDSGAVPLIADALNLSRAEVHGCITFYHDFRAHPAGRHEVKLCRAEACQAMGSDKLHREILGRLGCGWHETTADGSATVEPVYCLGLCANGPAALVDGEPVAHLTADALEAALTEVRQ

SEQ ID NO: 230 - DNA, 648 bp, Methylobacterium sp.
atgtacgtcccgcgctacaccggcgtgcagcgcgtgaaccactggatcaccgcgatcctgttcacgctgctgaccctgtcgggcctggcgatgttcacgccctacctgttctcgctcaccggcctgttcggtggcgggcaggcgacccgggcgatccatccctggttcggcgtggcgctggcggtcagcttcttcttcctgttcgtgcgcttctggaagctcaacatccccaacaaggacgatgtcgagtggacgaagcatatcggcgacgtggtcaccaaccgtgaggaccggctcccggagctcggcaagtacaatgccggacagaagggcgtgttctgggggcagaccgcgctgatcggcgtgatgttcgtcaccgggctcgtgatctggaacacctatttcggcggcctcacctccatcgagacccagcgctgggcgcttctggcccactccctcgccgcggtgatcgccatcgcgatcatcgtggtgcacatctacgccggcatctgggtccgcggcaccggccgggcgatggtccgcggcacggtcacgggcggctgggcctaccgccatcaccgcaagtggttccgtcagatggccggcggcacgggccgccggggttcggtggacaagcgcggatcctga

SEQ ID NO: 231 - protein, 215 aa, Methylobacterium sp.
MYVPRYTGVQRVNHWITAILFTLLTLSGLAMFTPYLFSLTGLFGGGQATRAIHPWFGVALAVSFFFLFVRFWKLNIPNKDDVEWTKHIGDVVTNREDRLPELGKYNAGQKGVFWGQTALIGVMFVTGLVIWNTYFGGLTSIETQRWALLAHSLAAVIAIAIIVVHIYAGIWVRGTGRAMVRGTVTGGWAYRHHRKWFRQMAGGTGRRGSVDKRGS

SEQ ID NO: 232 - DNA, 936 bp, Methylobacterium sp.
atggctgactacagctccctcgacatccgccagcgttccgcctccacggagacgccgccggagatccgccgccaggtggaggtcgccaagctcatcgacgtgtcgaagtgcatcggctgcaaggcctgccaatcggcctgcgaggagtggaacgacctccgcgacgatatcggcgtcaacacgggcacgtatcagaacccccacgacctcaccccgaagtcgtggaccctgatgcggttcaccgagtacgagaaccccgagacccagaacctcgaatggctgatccgcaaggacggctgcatgcactgcaccgagccgggctgcctgaaggcctgcccgtcccccggcgccatcgtgcagtactccaacggcatcgtcgacttcatcgaggagaactgcatcggctgcggctattgcgtgaagggttgcccctttaacatcccgcgcatcagccagaccgaccacaaggcgtacaagtgcaccctgtgctcggaccgggtggcggtgggtcaggctccggcctgcgccaaggcctgcccgaccggctcgatcatgttcggcaccaagcaggccatgatcgaccaggcgcatgaccgcgtcgaggatctgaagtcgcgcggcttcgcgcatgccggcctctacgacccggccggcgtcggcggcacgcacgtcatgtacgtgctgcaccacgccgaccaaccgagcctctacgccggtctgccgaacgacccgaagatctcgccgctcgtcgccttctggaagggcggagcgaaggtgttcggtctcgctgccatgggcttcgccgcggtggcgggcttcttccactacgtgacggccggccccaacgaggtcgtgcccgaagaggaggaagaggcggtcgaatacgacgaggccaagcgccgcgagaccggcggcggcgaggccaggccgcactga

SEQ ID NO: 233 - protein, 311 aa, Methylobacterium sp.
MADYSSLDIRQRSASTETPPEIRRQVEVAKLIDVSKCIGCKACQSACEEWNDLRDDIGVNTGTYQNPHDLTPKSWTLMRFTEYENPETQNLEWLIRKDGCMHCTEPGCLKACPSPGAIVQYSNGIVDFIEENCIGCGYCVKGCPFNIPRISQTDHKAYKCTLCSDRVAVGQAPACAKACPTGSIMFGTKQAMIDQAHDRVEDLKSRGFAHAGLYDPAGVGGTHVMYVLHHADQPSLYAGLPNDPKISPLVAFWKGGAKVFGLAAMGFAAVAGFFHYVTAGPNEVVPEEEEEAVEYDEAKRRETGGGEARPH

SEQ ID NO: 234 - protein, 401 aa, Pseudomonas putida
  misc_feature (355)..(355): Xaa can be any naturally occurring amino acid
MAKVLCVLYDDPVDGYPKTYARDDLPKIDHYPGGQTLPTPKAIDFTPGQLLGSVSGELGLRKYLESNGHTLVVTSDKDGPDSVFERELVDADVVISQPFWPAYLTPERIAKAKNLKLALTAGIGSDHVDLQSAIDRNVTVAEVTYCNSISVAEHVVMMILSLVRNYLPSHEWARKGGWNIADCVSHAYDLEAMHVGTVAAGRIGLAVLRRLAPFDVHLHYTDRHRLPESVEKELNLTWHATREDMYPVCDVVTLNCPLHPETEHMINDETLKLFKRGAYIVNTARGKLCDRDAVARALESGRLAGYAGDVWFPQPAPKDHPWRTMPYNGMTPHISGTTLTAQARYAAGTREILEXFFEGRPIRDEYLIVQGGALAGTGAHSYSKGNATGGSEEAAKFKKAV

SEQ ID NO: 235 - DNA, 1155 bp, Arabidopsis thaliana
atggcgatgagacaagccgctaaggcaacgatcagggcctgttcttcctcttcttcttcgggttacttcgctcgacgtcagtttaatgcatcttctggtgatagcaaaaagattgtaggagttttctacaaggccaacgaatacgctaccaagaaccctaacttccttggctgcgtcgagaatgccttaggaatccgtgactggcttgaatcccaaggacatcagtacatcgtcactgatgacaaggaaggccctgattgcgaacttgagaaacatatcccggatcttcacgtcctaatctccactcccttccacccggcgtatgtaactgctgaaagaatcaagaaagccaaaaacttgaagcttctcctcacagctggtattggctcggatcatattgatctccaggcagctgcagctgctggcctgacggttgctgaagtcacgggaagcaacgtggtctcagtggcagaagatgagctcatgagaatcttaatcctcatgcgcaacttcgtaccagggtacaaccaggtcgtcaaaggcgagtggaacgtcgcgggcattgcgtacagagcttatgatcttgaagggaagacgataggaaccgtgggagctggaagaatcggaaagcttttgctgcagcggttgaaaccattcgggtgtaacttgttgtaccatgacaggcttcagatggcaccagagctggagaaagagactggagctaagttcgttgaggatctgaatgaaatgctccctaaatgtgacgttatagtcatcaacatgcctctcacggagaagacaagaggaatgttcaacaaagagttgatagggaaattgaagaaaggcgttttgatagtgaacaacgcaagaggagccatcatggagaggcaagcagtggtggatgcggtggagagtggacacattggagggtacagcggagacgtttgggacccacagccagctcctaaggaccatccatggcgttacatgcctaaccaggctatgacccctcatacctccggcaccaccattgacgctcagctacggtatgcggcggggacgaaagacatgttggagagatacttcaagggagaagacttccctactgagaattacatcgtcaaggacggtgaacttgctcctcagtaccggtaa

SEQ ID NO: 236 - protein, 384 aa, Arabidopsis thaliana
MAMRQAAKATIRACSSSSSSGYFARRQFNASSGDSKKIVGVFYKANEYATKNPNFLGCVENALGIRDWLESQGHQYIVTDDKEGPDCELEKHIPDLHVLISTPFHPAYVTAERIKKAKNLKLLLTAGIGSDHIDLQAAAAAGLTVAEVTGSNVVSVAEDELMRILILMRNFVPGYNQVVKGEWNVAGIAYRAYDLEGKTIGTVGAGRIGKLLLQRLKPFGCNLLYHDRLQMAPELEKETGAKFVEDLNEMLPKCDVIVINMPLTEKTRGMFNKELIGKLKKGVLIVNNARGAIMERQAVVDAVESGHIGGYSGDVWDPQPAPKDHPWRYMPNQAMTPHTSGTTIDAQLRYAAGTKDMLERYFKGEDFPTENYIVKDGELAPQYR

SEQ ID NO: 237 - DNA, 1113 bp, Arabidopsis thaliana
atgatttttcagagttttagccttttgaacttgcttatgaaacaggcatcttctggtgatagcaaaaagattgtaggagttttctacaaggccaacgaatacgctaccaagaaccctaacttccttggctgcgtcgagaatgccttaggaatccgtgactggcttgaatcccaaggacatcagtacatcgtcactgatgacaaggaaggccctgattgcgaacttgagaaacatatcccggatcttcacgtcctaatctccactcccttccacccggcgtatgtaactgctgaaagaatcaagaaagccaaaaacttgaagcttctcctcacagctggtattggctcggatcatattgatctccaggcagctgcagctgctggcctgacggttgctgaagtcacgggaagcaacgtggtctcagtggcagaagatgagctcatgagaatcttaatcctcatgcgcaacttcgtaccagggtacaaccaggtcgtcaaaggcgagtggaacgtcgcgggcattgcgtacagagcttatgatcttgaagggaagacgataggaaccgtgggagctggaagaatcggaaagcttttgctgcagcggttgaaaccattcgggtgtaacttgttgtaccatgacaggcttcagatggcaccagagctggagaaagagactggagctaagttcgttgaggatctgaatgaaatgctccctaaatgtgacgttatagtcatcaacatgcctctcacggagaagacaagaggaatgttcaacaaagagttgatagggaaattgaagaaaggcgttttgatagtgaacaacgcaagaggagccatcatggagaggcaagcagtggtggatgcggtggagagtggacacattggagggtacagcggagacgtttgggacccacagccagctcctaaggaccatccatggcgttacatgcctaaccaggctatgacccctcatacctccggcaccaccattgacgctcagctacggtatgcggcggggacgaaagacatgttggagagatacttcaagggagaagacttccctactgagaattacatcgtcaaggacggtgaacttgctcctcagtaccggtaa

SEQ ID NO: 238 - protein, 370 aa, Arabidopsis thaliana
MIFQSFSLLNLLMKQASSGDSKKIVGVFYKANEYATKNPNFLGCVENALGIRDWLESQGHQYIVTDDKEGPDCELEKHIPDLHVLISTPFHPAYVTAERIKKAKNLKLLLTAGIGSDHIDLQAAAAAGLTVAEVTGSNVVSVAEDELMRILILMRNFVPGYNQVVKGEWNVAGIAYRAYDLEGKTIGTVGAGRIGKLLLQRLKPFGCNLLYHDRLQMAPELEKETGAKFVEDLNEMLPKCDVIVINMPLTEKTRGMFNKELIGKLKKGVLIVNNARGAIMERQAVVDAVESGHIGGYSGDVWDPQPAPKDHPWRYMPNQAMTPHTSGTTIDAQLRYAAGTKDMLERYFKGEDFPTENYIVKDGELAPQYR

SEQ ID NO: 239 - DNA, 1077 bp, Arabidopsis thaliana
atgaaacaagccagttcaggcgattcaaaaaagatagtcggggtgttttataaagctaacgagtacgccacaaagaatccaaactttcttggctgcgtcgaaaacgctcttgggatacgggattggctcgaatcccaaggtcatcaatatattgtgacagatgacaaggaaggtcccgattgtgaattagagaaacatattcccgatttacatgtattgatatcaacaccctttcaccccgcctatgtaactgctgagaggattaaaaaggccaaaaatttgaaactcctattgactgccgggataggatcagaccacatagatttacaagccgctgcagccgctgggctgacagtcgcggaggtgacgggatccaacgttgtatctgtagccgaggatgagctcatgagaatactgatcttaatgcggaactttgtacctggatataatcaagtagttaagggtgagtggaatgttgcgggtattgcctatagagcatacgacttagaggggaaaacgatcggtaccgtgggcgccgggcgtattggtaaattacttctgcaaagacttaaaccctttgggtgtaatctactctatcacgatagacttcagatggcacccgaattggaaaaagagactggagcgaaattcgtagaggaccttaatgaaatgttacctaaatgcgacgtaatagtcattaatatgcccctaaccgaaaaaactagaggtatgtttaacaaagaactcatcggtaagttaaaaaagggcgtcttgattgttaataacgcccgaggagctatcatggagcgccaagccgttgtcgacgctgtagaaagtggacacattggcgggtattctggggatgtctgggatccccaaccagctcctaaggatcatccttggcggtacatgccaaatcaagccatgacacctcatacatccggcaccactatagatgcacaattacgatatgccgctggcacaaaagatatgcttgaacggtattttaagggagaggactttcccacagaaaattatattgtaaaggatggggagttggctccccagtatagataa

SEQ ID NO: 240 - protein, 358 aa, Arabidopsis thaliana
MKQASSGDSKKIVGVFYKANEYATKNPNFLGCVENALGIRDWLESQGHQYIVTDDKEGPDCELEKHIPDLHVLISTPFHPAYVTAERIKKAKNLKLLLTAGIGSDHIDLQAAAAAGLTVAEVTGSNVVSVAEDELMRILILMRNFVPGYNQVVKGEWNVAGIAYRAYDLEGKTIGTVGAGRIGKLLLQRLKPFGCNLLYHDRLQMAPELEKETGAKFVEDLNEMLPKCDVIVINMPLTEKTRGMFNKELIGKLKKGVLIVNNARGAIMERQAVVDAVESGHIGGYSGDVWDPQPAPKDHPWRYMPNQAMTPHTSGTTIDAQLRYAAGTKDMLERYFKGEDFPTENYIVKDGELAPQYR

SEQ ID NO: 241 - protein, 333 aa, Escherichia coli
MIDLRSDTVTRPSRAMLEAMMAAPVGDDVYGDDPTVNALQDYAAELSGKEAAIFLPTGTQANLVALLSHCERGEEYIVGQAAHNYLFEAGGAAVLGSIQPQPIDAAADGTLPLDKVAMKIKPDDIHFARTKLLSLENTHNGKVLPREYLKEAWEFTRERNLALHVDGARIFNAVVAYGCELKEITQYCDSFTICLSKGLGTPVGSLLVGNRDYIKRAIRWRKMTGGGMRQSGILAAAGIYALKNNVARLQEDHDNAAWMAEQLREAGADVMRQDTNMLFVRVGEENAAALGEYMKARNVLINASPIVRLVTHLDVSREQLAEVAAHWRAFLAR

SEQ ID NO: 242 - protein, 454 aa, Escherichia coli
MISLFDMFKVGIGPSSSHTVGPMKAGKQFVDDLVEKGLLDSVTRVAVDVYGSLSLTGKGHHTDIAIIMGLAGNEPATVDIDSIPGFIRDVEERERLLLAQGRHEVDFPRDNGMRFHNGNLPLHENGMQIHAYNGDEVVYSKTYYSIGGGFIVDEEHFGQDAANEVSVPYPFKSATELLAYCNETGYSLSGLAMQNELALHSKKEIDEYFAHVWQTMQACIDRGMNTEGVLPGPLRVPRRASALRRMLVSSDKLSNDPMNVIDWVNMFALAVNEENAAGGRVVTAPTNGACGIVPAVLAYYDHFIESVSPDIYTRYFMAAGAIGALYKMNASISGAEVGCQGEVGVACSMAAAGLAELLGGSPEQVCVAAEIGMEHNLGLTCDPVAGQVQVPCIERNAIASVKAINAARMALRRTSAPRVSLDKVIETMYETGKDMNAKYRETSRGGLAIKVQCD

SEQ ID NO: 243 - protein, 267 aa, Escherichia coli
MNALLSNPFKERLRKGEVQIGLWLSSTTAYMAEIAATSGYDWLLIDGEHAPNTIQDLYHQLQAVAPYASQPVIRPVEGSKPLIKQVLDIGAQTLLIPMVDTAEQARQVVSATRYPPYGERGVGASVARAARWGRIENYMAQVNDSLCLLVQVESKTALDNLDEILDVEGIDGVFIGPADLSASLGYPDNAGHPEVQRIIETSIRRIRAAGKAAGFLAVAPDMAQQCLAWGANFVAVGVDTMLYSDALDQRLAMFKSGKNGPRIKGSY

SEQ ID NO: 244 - protein, 396 aa, Escherichia coli
MFENITAAPADPILGLADLFRADERPGKINLGIGVYKDETGKTPVLTSVKKAEQYLLENETTKNYLGIDGIPEFGRCTQELLFGKGSALINDKRARTAQTPGGTGALRVAADFLAKNTSVKRVWVSNPSWPNHKSVFNSAGLEVREYAYYDAENHTLDFDALINSLNEAQAGDVVLFHGCCHNPTGIDPTLEQWQTLAQLSVEKGWLPLFDFAYQGFARGLEEDAEGLRAFAAMHKELIVASSYSKNFGLYNERVGACTLVAADSETVDRAFSQMKAAIRANYSNPPAHGASVVATILSNDALRAIWEQELTDMRQRIQRMRQLFVNTLQEKGANRDFSFIIKQNGMFSFSGLTKEQVLRLREEFGVYAVASGRVNVAGMTPDNMAPLCEAIVAVL

SEQ ID NO: 245 - DNA, 2316 bp, Rhodococcus ruber
atgagtgcatcagttccggcgtcggcgtgtcccgtcgatcacgcggccctggccggcggctgtccggtgtcgacgaacgccgcggcgttcgatccgttcgggcccgcgtaccaggccgatccggccgagtcgctgcgctggtcccgcgacgaggagccggtgttctacagccccgaactcggctactgggtggtcacccgctacgaggatgtgaaggcggtgttccgcgacaacctcgtgttctcaccggccatcgccctcgagaagatcaccccggtctccgaggaggccaccgccaccctcgcccgctacgactacgccatggcccggaccctcgtgaacgaggacgagcccgcccacatgccgcgccgccgcgcactcatggacccgttcaccccgaaggaactggcgcaccacgaggcgatggtgcgacggctcacgcgcgaatacgtcgaccgcttcgtcgaatccggcaaggccgacctggtggacgagatgctgtgggaggtaccgctcaccgtcgccctgcacttcctcggcgtgccggaggaggacatggcgacgatgcgcaagtactcgatcgcccacaccgtgaacacctggggccgccccgcgcccgaggagcaggtcgccgtcgccgaggcggtcggcaggttctggcagtacgcgggcacggtgctcgagaagatgcgccaggacccctcggggcacggctggatgccctacgggatccgcatgcagcagcagatgccggacgtcgtcaccgactcctacctgcactcgatgatgatggccggcatcgtcgccgcgcacgagaccacggccaacgcgtccgcgaacgcgttcaagctgctgctcgagaaccgcccggtgtgggaggagatctgcgcggatccgtcgctgatccccaacgccgtcgaggagtgcctgcgccactcgggatcggtcgcggcgtggcgacgggtggccaccaccgacacccgcatcggcgacgtcgacatccccgccggcgcaaagctgctcgtcgtcaacgcctccgccaaccatgacgagcggcacttcgaccgtcccgacgagttcgacatccggcgcccgaactcgagcgaccacctcaccttcgggtacggcagccatcagtgcatgggcaagaacctggcccgcatggagatgcagatcttcctcgaggaactgaccacgcggcttccccacatggaactcgtacccgatcaggagttcacctacctgccgaacacctcgttccgcggtcccgatcacgtgtgggtgcagtgggatccgcaggcgaaccccgagcgcaccgacccggccgtgctgcaacggcagcatcccgtcaccatcggcgagccctccacccggtcggtgtcacgcaccgtcaccgtcgagcgcctggaccggatcgtcgacgacgtgctgcgcgtcgtcctacgggctcctgcaggaaatgcgttgcccgcgtggactcctggcgcccacatcgatgtcgacctcggtgcgctgtcgcggcagtactccctgtgcggtgcgcccgacgcgcccacctacgagatcgccgttctgctggaccccgagagccgcggtggctcgcgctacgtccacgaacagctccgggtggggggatcgctccggattcgcgggccccggaaccacttcgcgctcgaccccgacgccgagcactacgtgttcgtggccggcggcatcggcatcacccccgtcctggccatggccgaccacgcccgcgcccgggggtggagctacgaactgcactactgcggccggaaccgttccgggatggcctatctcgagcgggtcgccgggcacggggaccgcgccgccctgcacgtctcggcggaaggcacccgggtcgacctcgccgccctcctcgcgacgccggtgtccggcacccagatctacgcgtgcgggcccggacggctgctcgccggactcgaggacgcgagccggcactggcccgacggtgcgctgcacgtcgagcacttcacctcgtccctcacggcactcgacccggacgtcgagcacgccttcgacctcgacctgcgcgactcgggactcaccgtgcgggtcgagcccacccagaccgtcctcgacgcgttgcgcgccaacaacatcgacgtgcccagcgactgcgaggaaggcctctgcggctcctgcgaggtcaccgtcctcgaaggcgaggtcgaccaccgcgacaccgtgctcaccaaggccgagcgggcggcgaaccggcagatgatgacctgctgctcgcgtgcctgcggcgaccgactgaccctccgactctga

SEQ ID NO: 246 - protein, 771 aa, Rhodococcus ruber
MSASVPASACPVDHAALAGGCPVSTNAAAFDPFGPAYQADPAESLRWSRDEEPVFYSPELGYWVVTRYEDVKAVFRDNLVFSPAIALEKITPVSEEATATLARYDYAMARTLVNEDEPAHMPRRRALMDPFTPKELAHHEAMVRRLTREYVDRFVESGKADLVDEMLWEVPLTVALHFLGVPEEDMATMRKYSIAHTVNTWGRPAPEEQVAVAEAVGRFWQYAGTVLEKMRQDPSGHGWMPYGIRMQQQMPDVVTDSYLHSMMMAGIVAAHETTANASANAFKLLLENRPVWEEICADPSLIPNAVEECLRHSGSVAAWRRVATTDTRIGDVDIPAGAKLLVVNASANHDERHFDRPDEFDIRRPNSSDHLTFGYGSHQCMGKNLARMEMQIFLEELTTRLPHMELVPDQEFTYLPNTSFRGPDHVWVQWDPQANPERTDPAVLQRQHPVTIGEPSTRSVSRTVTVERLDRIVDDVLRVVLRAPAGNALPAWTPGAHIDVDLGALSRQYSLCGAPDAPTYEIAVLLDPESRGGSRYVHEQLRVGGSLRIRGPRNHFALDPDAEHYVFVAGGIGITPVLAMADHARARGWSYELHYCGRNRSGMAYLERVAGHGDRAALHVSAEGTRVDLAALLATPVSGTQIYACGPGRLLAGLEDASRHWPDGALHVEHFTSSLTALDPDVEHAFDLDLRDSGLTVRVEPTQTVLDALRANNIDVPSDCEEGLCGSCEVTVLEGEVDHRDTVLTKAERAANRQMMTCCSRACGDRLTLRL

SEQ ID NO: 247 - DNA, 1497 bp, Pseudomonas stutzeri
atgtccatgctgaagagagaagattggtatgaccttacaaggacaactaactggacacctaagtacgttaccgagaatgaactctttcctgaggagatgtcaggagcaaggggaatttcaatggaagcctgggaaaagtacgacgaaccatataaaattacgtatccggagtacgtatcgatccaacgggagaaagattctggagcttatagcattaaggccgcgttagagcgtgatggattcgtggaccgtgccgatcctgggtgggtttccactatgcaacttcactttggagctatagccctcgaagaatatgcagcttcaactgccgaggcaaggatggccagattcgcaaaagcgcctggtaatcgaaacatggccacattcggaatgatggatgagaaccgacacggacaaattcagctttattttccgtatgctaacgttaaaagaagtagaaagtgggattgggcacataaagctattcacactaatgaatgggccgctatagccgctaggagcttctttgatgatatgatgatgacgagagacagtgtagctgtctcgatcatgcttactttcgcattcgagacagggttcacgaatatgcaattccttggccttgcagcggatgcggcggaagcaggagatcacacatttgcatctctaatttcgtccatccaaacagatgaatcgagacatgcgcagcaaggtggaccaagccttaagatacttgttgaaaacggaaagaaggatgaagcacagcagatggtcgatgttgccatctggcgttcctggaaactatttagcgttttaacaggacctattatggactactacacacctcttgagagtcgaaatcagtctttcaaggaatttatgttagaatggattgttgctcaatttgaacgtcaattgctcgatcttggacttgacaagccctggtattgggatcaatttatgcaagatcttgacgaaactcatcacggaatgcaccttggcgtttggtactggcggccaacggtttggtgggacccagcggcgggagtttctcctgaggagagggagtggcttgaagaaaagtacccaggttggaatgacacctggggacagtgctgggatgtcatcacggataatctcgttaatggcaagcctgagctaaccgtaccggagacattaccaaccatttgcaatatgtgcaacttaccaatcgctcacactccaggaaataaatggaatgtcaaggattaccagctagagtacgaaggcagattgtaccactttgggagcgaggccgaccgttggtgtttccagatcgaccctgagcggtacgaaaaccatactaacctggtggaccgattcttgaagggtgaaattcaaccggcagacctcgcgggtgccctgatgtacatgagccttgaaccaggagttatgggagatgatgcgcacgactatgaatgggtcaaagcctatcagaagaaaacaaatgctgcttga

SEQ ID NO: 248 - protein, 498 aa, Pseudomonas stutzeri
MSMLKREDWYDLTRTTNWTPKYVTENELFPEEMSGARGISMEAWEKYDEPYKITYPEYVSIQREKDSGAYSIKAALERDGFVDRADPGWVSTMQLHFGAWALEEYAASTAEARMARFAKAPGNRNMATFGMMDENRHGQIQLYFPYANVKRSRKWDWAHKAIHTNEWAAIAARSFFDDMMMTRDSVAVSIMLTFAFETGFTNMQFLGLAADAAEAGDHTFASLISSIQTDESRHAQQGGPSLKILVENGKKDEAQQMVDVAIWRSWKLFSVLTGPIMDYYTPLESRNQSFKEFMLEWIVAQFERQLLDLGLDKPWYWDQFMQDLDETHHGMHLGVWYWRPTVWWDPAAGVSPEEREWLEEKYPGWNDTWGQCWDVITDNLVNGKPELTVPETLPTICNMCNLPIAHTPGNKWNVKDYQLEYEGRLYHFGSEADRWCFQIDPERYKNHTNLVDRFLKGEIQPADLAGALMYMSLEPGVMGDDAHDYEWVKAYQKKTNAA

SEQ ID NO: 249 - DNA, 1503 bp, Pseudomonas aeruginosa
atggctgtattgaatcggacggactggtacgacgtcgccagaacaactaattggacgccgaaatatgtcacggaggacgagctgtttccgccggagctgagcggcagcttcgatatccccatggagaaatgggaggcctatgacgagccctacaagcagacctatcccgaatacgtcaaggtgcagcgggaaaaggatgcgggtgtctactcggtcaaggcggccctcgagcgcagcaagatgttcgagaacgccgatccgggctggcaatcggtattgaaattgcacttcggagccatccccagcggcgaatatgccgcgtccaccgccgaggcgcggatgatgcgcttctccaaggcaccgggtatgcgcaacatggcgacgctgggtagcatggatgaaattcggcacgcgcaactgcagctctattttccgcacgagcatgtctcgaaggaccgtcagttcgactgggcgcacaaggcattcgacaccaacgaatgggccgcgatcgcgtcacgccacttcttcgacgacatcatgatggcgcgcgatgccatcagtgtcggcatcatgctcaccttcgggttcgagaccggtttcaccaacatgcagttcctcgggctggcggcggacgccgccgaggcgggggacttcaccttctccagcctgatctccagcatccagaccgacgaatcgcgccacgctcagatcggcgggcctacgctgcagatcctgatcgaaaacggcaggaaggaagaggcccagaagaaggtggacatcgcgttctggcgcgcgtggaggctgttctcggtactgaccggcccgatcatggactactacacgccgctggagcaccgcaatcagtcgttcaaggaattcatgcaggagtggatcgtcgagcagttcgagcgttccattcacgatctggggctggacaagccctggtattgggacatcttcctggagcaactggaccagcaacatcacggcatgcatctgggcgtctggtactggcgacccaccgtctggtggaacccgacagccggcgttacgcccgaagagcgcgactggctcgaagaaaaatacccgggttggaacgacacctggggccactgttgggacgtgatcatcgacaacctggtggaaggccggaccgaactcaccctgccggaaaccctgccgatcgtatgcaacatgtgcaacctcccgatcaactacacgccaggcaacggctggaatgtccaggattattcgctcgaatacaacggacgcctgtatcacttcggctcggagccggatcgctggatcttcgagcaggaacccgaacgctatgcgggtcacatgaccctggtggaccgcttcctggccggattgatccagccaatggacctgggtggcgccctggcctatatggacctcgcgccgggcgagagcggtgacgatgcacatggctattcctgggtcgaggtctacaagcagttgcgcacgaaaaaagcgagttga

SEQ ID NO: 250 - protein, 500 aa, Pseudomonas aeruginosa
MAVLNRTDWYDVARTTNWTPKYVTEDELFPPELSGSFDIPMEKWEAYDEPYKQTYPEYVKVQREKDAGVYSVKAALERSKMFENADPGWQSVLKLHFGAIPSGEYAASTAEARMMRFSKAPGMRNMATLGSMDEIRHAQLQLYFPHEHVSKDRQFDWAHKAFDTNEWAAIASRHFFDDIMMARDAISVGIMLTFGFETGFTNMQFLGLAADAAEAGDFTFSSLISSIQTDESRHAQIGGPTLQILIENGRKEEAQKKVDIAFWRAWRLFSVLTGPIMDYYTPLEHRNQSFKEFMQEWIVEQFERSIHDLGLDKPWYWDIFLEQLDQQHHGMHLGVWYWRPTVWWNPTAGVTPEERDWLEEKYPGWNDTWGHCWDVIIDNLVEGRTELTLPETLPIVCNMCNLPINYTPGNGWNVQDYSLEYNGRLYHFGSEPDRWIFEQEPERYAGHMTLVDRFLAGLIQPMDLGGALAYMDLAPGESGDDAHGYSWVEVYKQLRTKKAS

SEQ ID NO: 251 - DNA, 981 bp, Pseudomonas mendocina
atgttcaatattcaatcggatgatctcctgcaccattttgaggcggatagtaatgacactctacttagtgctgctctacgtgctgaattggtatttccatatgagtgtaactcaggagggtgcggcgcatgtaagatcgagctgcttgagggagaggtctctaacctatggcctgatgcaccaggattagccgcccgtgaactccgtaagaatcgttttttggcgtgccagtgcaaaccattatccgacctcaaaattaaggtcattaaccgtgcggagggacgtgcttcacatccccccaaacgtttctcgactcgagtagttagtaagcgcttcctctctgacgagatgtttgagctgcgacttgaagcggaacagaaagtggtgttttcaccagggcaatattttatggttgacgtgcctgaactcggcaccagagcatactccgcggcaaaccctgttgatggaaacacactaacgctgatcgtaaaagcagtgccgaatgggaaggtatcctgcgcactcgcaaatgaaactattgaaacacttcagttggatggtccttacgggctgtcagtattaaaaactgcggatgaaactcaatccgtctttatcgctggggggtcaggtatcgcgccgatggtgtcgatggtgaatacgctgattgcccaagggtatgaaaaaccgattacggtgttttacggttcacggctagaagctgaactggaagcggccgaaaccctgtttgggtggaaagaaaatttaaaactgattaatgtgtcgtcgagcgtggtgggtaactcggagaaaaagtatccgaccggttatgtccatgagataattcctgaatacatggaggggctgctaggtgccgagttctatctgtgcggcccgccgcagatgattaactccgtccagaagttgcttatgattgaaaataaagtaccgttcgaagcgattcattttgataggttcttttaa

SEQ ID NO: 252 - protein, 326 aa, Pseudomonas mendocina
MFNIQSDDLLHHFEADSNDTLLSAALRAELVFPYECNSGGCGACKIELLEGEVSNLWPDAPGLAARELRKNRFLACQCKPLSDLKIKVINRAEGRASHPPKRFSTRVVSKRFLSDEMFELRLEAEQKVVFSPGQYFMVDVPELGTRAYSAANPVDGNTLTLIVKAVPNGKVSCALANETIETLQLDGPYGLSVLKTADETQSVFIAGGSGIAPMVSMVNTLIAQGYEKPITVFYGSRLEAELEAAETLFGWKENLKLINVSSSVVGNSEKKYPTGYVHEIIPEYMEGLLGAEFYLCGPPQMINSVQKLLMIENKVPFEAIHFDRFF

SEQ ID NO: 253 - DNA, 1500 bp, Methylibium petroleiphilum
atggcccttcttgagagaatggattggtatgatctagcccgaaccaccaattggacaccgacttatgtctccgaggcggaattgtttccgaccgaaatgtctggggatatgggaatacctatgtctgaatgggagaaatatgatgagccctacaagcagacctattcagaatacgtcaaaatccagcgtgagaaagacagcggtgcctactctgtgaagggtgcccttgaaagaagcaaaatgttggaaaacgctgaccctggctggatctccgttatcaaagcacactatggagcaatcgccagggctgaatacgcggcagcttctgctgagtctcgtatggccaggttcgccaaagcaccagggcaacgtaacatggcaacaatgggtatgttagacgagatcagacatggccagatccaattgttcttcccacatgagcatgtatcaaaagacagacaatttgactgggcttttaaagcctacgacacgaatgagtggggagcaatcgctgctcgtcatatgtttgatgacatgatgaacacacgtagcgctgtggctatcggcctcatgttaacattcgcattcgagactggcttcacgaacatgcaatttctgggactggcagcagatgcagctgaagcaggtgactggacgtttgctagtatgatctcaagtgtacagactgacgagtcacgacatgctcagataggtggacccctcgtgccaatcctgatcgctaacggaaagaaggcagaggcacagcgtatgattgacgtagccttttggcgtagctggaaattgttcacagttttaacgggtccgatgatggactattacacacctctcgctcatcgtaagcagtcatttaaggaatttatgcaagaatttatcgtaactcaattcgagcgatctatattggatcttgggttggaaagaccctggtactgggatcaattccttgcagaactagactatcagcaccacgggatgcacttaggtgtgtggttttggcgtcctacagtttggtggaatcctgcggcaggagtcacgcctgaagagagagcatggttagaagaaaagtacccaggttggaacgatacttggggcaaatcatgggacgttattgtggataatttattaaaagacaaacgagagctgacctatccggagacattgccggtagtctgtaatatgtgcaaccttcccatcaatgctacacctggggacccttggaaagttcgtgaccactccctggagaggaaatcgagatggtaccacttctgttccgaaggctgtaagtggtgcttcgagcaagagcctgaaagatacgagggccacctttctcttatcgacaggtttcttgcagggttgatccagccaatggacctaggaggaggactcaaatatatgggattagcgcctggagagataggtgacgacgctcacggatatgcctggttggacgcatataggcaggtgccaaaggcagcagcataa

SEQ ID NO: 254 - protein, 499 aa, Methylibium petroleiphilum
MALLERMDWYDLARTTNWTPTYVSEAELFPTEMSGDMGIPMSEWEKYDEPYKQTYSEYVKIQREKDSGAYSVKGALERSKMLENADPGWISVIKAHYGAIARAEYAAASAESRMARFAKAPGQRNMATMGMLDEIRHGQIQLFFPHEHVSKDRQFDWAFKAYDTNEWGAIAARHMFDDMMNTRSAVAIGLMLTFAFETGFTNMQFLGLAADAAEAGDWTFASMISSVQTDESRHAQIGGPLVPILIANGKKAEAQRMIDVAFWRSWKLFTVLTGPMMDYYTPLAHRKQSFKEFMQEFIVTQFERSILDLGLERPWYWDQFLAELDYQHHGMHLGVWFWRPTVWWNPAAGVTPEERAWLEEKYPGWNDTWGKSWDVIVDNLLKDKRELTYPETLPVVCNMCNLPINATPGDPWKVRDHSLERKSRWYHFCSEGCKWCFEQEPERYEGHLSLIDRFLAGLIQPMDLGGGLKYMGLAPGEIGDDAHGYAWLDAYRQVPKAAA

SEQ ID NO: 255 - DNA, 1353 bp, Pseudomonas putida
atgaaccaaactgacacctcacccatccgactacgacggtcgtggaataccagtgagattgaggcattgtttgatgagcacgccggtaggattgatcctagaatttatacggatgaggacctttatcagcttgagcttgagagagtctttgctaggtcatggttgctcttggggcatgaaacccaaattcggaaaccaggtgactacattacaacctacatgggggaggacccagtggttgtggttagacaaaaagatgcgagtatagcggtatttttaaaccaatgcaggcatagagggatgagaatttgtagagccgatgcaggcaacgctaaggcttttacatgcagttatcatgggtgggcatacgataccgcaggcaacttggtcaatgtaccttatgaggcggaaagctttgcttgcttgaataaaaaggagtggtcccccttaaaagcccgcgtggaaacctacaagggactgatatttgccaattgggatgaaaacgccgttgacctcgatacctatttgggtgaagcaaagttttatatggaccatatgttggatcggacagaagcagggactgaagcaattcccggggtacaaaaatgggtgattccctgtaattggaaatttgccgcagaacaattttgttctgatatgtatcacgctggcaccacttcacatctcagtgggatccttgctggccttccagaggacttagagatggctgacttggcaccaccgactgttgggaaacaatatcgcgcatcatggggtggccacggtagtggtttttatgttggagatcccaatttgatgctggccataatgggtccaaaagttacatcatattggactgaagggcccgcctccgagaaggccgctgagcggttaggttcggtagagcgtgggtccaaattgatggtagaacacatgactgttttccccacctgtagttttctgcccggaataaatacagtgaggacttggcatcctcggggaccaaacgaggtggaagtatgggcgtttactgtggtagatgcggacgctccggacgatataaaagaagagtttcgtagacaaaccctcagaactttctctgctggcggtgtatttgagcaagatgacggggaaaattgggtggagattcaacacattcttcggggtcacaaggctcgctctcgtccctttaacgcagagatgagcatggatcaaactgtggataatgatcctgtttatccagggcgaatttctaataacgtgtacagtgaggaagcggcacgaggattatacgctcattggcttaggatgatgacttctccggactgggatgctttgaaagctactaggtga

SEQ ID NO: 256 - protein, 450 aa, Pseudomonas putida
MNQTDTSPIRLRRSWNTSEIEALFDEHAGRIDPRIYTDEDLYQLELERVFARSWLLLGHETQIRKPGDYITTYMGEDPVVVVRQKDASIAVFLNQCRHRGMRICRADAGNAKAFTCSYHGWAYDTAGNLVNVPYEAESFACLNKKEWSPLKARVETYKGLIFANWDENAVDLDTYLGEAKFYMDHMLDRTEAGTEAIPGVQKWVIPCNWKFAAEQFCSDMYHAGTTSHLSGILAGLPEDLEMADLAPPTVGKQYRASWGGHGSGFYVGDPNLMLAIMGPKVTSYWTEGPASEKAAERLGSVERGSKLMVEHMTVFPTCSFLPGINTVRTWHPRGPNEVEVWAFTVVDADAPDDIKEEFRRQTLRTFSAGGVFEQDDGENWVEIQHILRGHKARSRPFNAEMSMDQTVDNDPVYPGRISNNVYSEEAARGLYAHWLRMMTSPDWDALKATR

SEQ ID NO: 257 - DNA, 465 bp, Pseudoxanthomonas sp.
atgcaattcctaggcctagctgctgacgccgccgaagcaggagatcacacatttgcttcattgatcagctcaatacagactgacgaatctaggcatgctcagatcggtggaccagccttacaggttcttattgctaacggccaaaaggccacggctcagaagaaggttgatattgcattttggagagcatggaaactatttgccgtgttaacgggaccaatgatggactactatactccacttgaacaccgaaaacagagtttcaaggagtttatggaagagtggatcgtagctcagttcgaacgtgctttgactgatttaggtcttgatttgccctggtattgggaccacttcctagaagaacttagccagacacaccacggaatgcacctgggagtatggttttggcgtccaactgtctggtggaacccagccgctggggtaacaccaacggaaagagattaa

SEQ ID NO: 258 - protein, 154 aa, Pseudoxanthomonas sp.
MQFLGLAADAAEAGDHTFASLISSIQTDESRHAQIGGPALQVLIANGQKATAQKKVDIAFWRAWKLFAVLTGPMMDYYTPLEHRKQSFKEFMEEWIVAQFERALTDLGLDLPWYWDHFLEELSQTHHGMHLGVWFWRPTVWWNPAAGVTPTERD

SEQ ID NO: 259 - DNA, 1502 bp, Pseudomonas mendocina
atggcaatgaccctcggaaagactggtacgaattgaccagagctacaaattggacgccttcatacgttactgaggaacagcttttccccgagagaatgtccgggcacatgggaataccacttgagaaatgggaatcctacgacgaaccatataagacatcatatccagagtatgtctctattcagcgagagaaggacgctggcgcttactctgttaaggcggcgctcgaacgtgctaagatctatgaaaactctgaccctggctggataagcacattgaagtcacactacggagcaatagcggttggcgaatacgcggctgtaactggtgagggacgaatggctcggttttcgaaagcccctgggaatcgtaacatggctacttttgggatgatggatgagctgaggcacggacagttacaactgttctttccacatgagtattgcaagaaggacagacaattcgattgggcatggagagcatatcatagcaatgaatgggccgccatagctgctaaacacttcttcgacgacatcatcaccggcagggacgcaatctcagtcgcgatcatgttaacattctcattcgagacgggttttactaacatgcagttcctaggattggccgcagacgcagcagaagcaggcgattatacgtttgccaatcttatatcttctatccagaccgatgaatccagacacgcacagcaaggtggcccggcccttcaattgctcatagaaaacggaaaacgagaagaggcgcagaagaaggtcgatatggctatctggagagcatggagacttttcgcagtcctgacaggacctgttatggactactatacaccattagaagatagatctcaatcattcaaagaatttatgtacgaatggattattgggcagttcgagcgttctctaatagaccttggtttggataaaccatggtactgggaccttttcctaaaagatattgacgaattacaccactcttatcacatgggtgtgtggtattggcgaacgacagcatggtggaaccctgctgctggagttactcccgaggagagagactggcttgaagagaagtatccaggatggaacaagagatggggacgttgttgggacgtaattaccgaaaatgtattgaatgaccggatggatttggtcagcccggaaactttgccgtcagtgtgcaatatgtcccagatccctctggttggtgtcccgggcgatgactggaacattgaggttttcagcctagagcacaacggaaggttgtaccactttgggtccgaagtggacagatgggttttccaacaggacccggttcaataccaaaaccacatgaacatcgtagatcggtttctcgccggacagatccaacctatgacgcttgaaggggcacttaagtacatgggttttcaatccattgaggagatgggcaaagacgcacacgacttcgcatgggccgacaaatgcaaacctgctatgaagaagagcgcctag

SEQ ID NO: 260 - protein, 500 aa, Pseudomonas mendocina
MAMHPRKDWYELTRATNWTPSYVTEEQLFPERMSGHMGIPLEKWESYDEPYKTSYPEYVSIQREKDAGAYSVKAALERAKIYENSDPGWISTLKSHYGAIAVGEYAAVTGEGRMARFSKAPGNRNMATFGMMDELRHGQLQLFFPHEYCKKDRQFDWAWRAYHSNEWAAIAAKHFFDDIITGRDAISVAIMLTFSFETGFTNMQFLGLAADAAEAGDYTFANLISSIQTDESRHAQQGGPALQLLIENGKREEAQKKVDMAIWRAWRLFAVLTGPVMDYYTPLEDRSQSFKEFMYEWIIGQFERSLIDLGLDKPWYWDLFLKDIDELHHSYHMGVWYWRTTAWWNPAAGVTPEERDWLEEKYPGWNKRWGRCWDVITENVLNDRMDLVSPETLPSVCNMSQIPLVGVPGDDWNIEVFSLEHNGRLYHFGSEVDRWVFQQDPVQYQNHMNIVDRFLAGQIQPMTLEGALKYMGFQSIEEMGKDAHDFAWADKCKPAMKKSA

SEQ ID NO: 261 - DNA, 1065 bp, Pinus taeda
atggcgtttccactccagaaaacttttctctgctcaaatggccaatcattcccctgctcaaatggccgatcgacatctacactgctagcatccgacctcaagtttcaacgacttaataagcctttcatcctcagagtcggaagcatgcaaatcagaaatagtcctaaagaacacccaagagtgagcagcgcagctgtgttgcctccagtaccaagatctattcacgacatacctaatggtgatcatattcttgggtttggggcaaatttagcagaagatcatccaggataccatgatgaagaatacaagagaaggcggtcatgtattgctgacctggccaagaaacacaaaataggagaacccattcctgagatcaactatactactgaagaagctcatgtttgggcagaagtccttacaaagcttagtgaattgtaccccagtcatgcttgcaaagagtatttggaatcatttccacttttcaacttttctcctaacaaaattcctcaactagaagagctttcacagattttgcagcattacactggttggaaaataagacctgttgcagggctgttgcacccacgtcaatttttgaatggactagctttcaaaacattccattcaacacagtatattcgtcacactagcaatccaatgtacactcctgaacctgacatttgccatgagatacttggtcacatgccaatgcttgtacaccctgagtttgctgatcttgctcaggttattggcttagcatcactgggagcatcagataaagaaatttggcatcttactaagctatattggtatacagttgagtttggaacaattgaagaaaataaggaagttaaggcatttggagctggcatactgtcaagttttggtgagcttcaacacatgaagtctagcaaaccaacatttcagaaacttgatccattcgctcagctacccaagatgagttacaaggatggatttcaaaatatgtacttcttatgtcaaagtttttcagacactacagaaaagcttcgctcctatgcaagaactattcactctggtaattaa

SEQ ID NO: 262 - protein, 354 aa, Pinus taeda
MAFPLQKTFLCSNGQSFPCSNGRSTSTLLASDLKFQRLNKPFILRVGSMQIRNSPKEHPRVSSAAVLPPVPRSIHDIPNGDHILGFGANLAEDHPGYHDEEYKRRRSCIADLAKKHKIGEPIPEINYTTEEAHVWAEVLTKLSELYPSHACKEYLESFPLFNFSPNKIPQLEELSQILQHYTGWKIRPVAGLLHPRQFLNGLAFKTFHSTQYIRHTSNPMYTPEPDICHEILGHMPMLVHPEFADLAQVIGLASLGASDKEIWHLTKLYWYTVEFGTIEENKEVKAFGAGILSSFGELQHMKSSKPTFQKLDPFAQLPKMSYKDGFQNMYFLCQSFSDTTEKLRSYARTIHSGN

SEQ ID NO: 263 - DNA, 1062 bp, Pseudoxanthomonas sp.
atgagttacaccgtcactattgagccgatcggcgagcagattgaggtagaggatggccagactatcctcgccgccgccctgcgccagggtgtctggctgccctttgcctgcggccacggcacctgtgctacctgtaaggttcaggtgcttgaaggtgatgtcgagatcggaaacgcctcgccctttgcgctgatggatatcgaacgtgacgagggcaaggttctggcctgctgcgccacggttgagagcgacgtcaccattgaggtggacatcgatgtggatccggattttgagggctacccggtggaggactatgccgccatagcgaccgatatcgtcgaactctctccgaccatcaagggcattcacctgaaactggaccggccgatgacattccaggccggccagtacatcaatatcgaactgccgggtgttgaaggcgcgagggccttctccctggccaacccgcccagcaaagcagacgaagtggagctgcatgtgcgcctcgttgagggcggtgctgccaccacctacatccacgaacaactgaaaacgggtgatgcgctgaacctttcaggcccttacggccagttcttcgtgcgtagttcccaacccggcgatctgattttcatcgccggcggatccggattgtccagtccccagtcgatgatccttgatctgcttgagcagaacgatgagcgcaagatcgttctgttccagggtgcccgaaacctggcagagctttacaaccgggagctgtttgaggctctggatcgcgaccacgacaatttcacctacgtaccggcgcttagccaagccgacgaagaccctgactggaagggcttccgaggctatgtccatgaggcggccaacgcccatttcgatggccggtttgccggtaacaaggcatacctgtgcggcccgcctccaatgatcgatgcggctatcacggcattgatgcaggggcggctgttcgagcgtgacatcttcatggagaaattcctgacagcggcggacggagctgaagacacccagcgttcggccctgttcaagaagatatag

SEQ ID NO: 264 - protein, 353 aa, Pseudoxanthomonas sp.
MSYTVTIEPIGEQIEVEDGQTILAAALRQGVWLPFACGHGTCATCKVQVLEGDVEIGNASPFALMDIERDEGKVLACCATVESDVTIEVDIDVDPDFEGYPVEDYAAIATDIVELSPTIKGIHLKLDRPMTFQAGQYINIELPGVEGARAFSLANPPSKADEVELHVRLVEGGAATTYIHEQLKTGDALNLSGPYGQFFVRSSQPGDLIFIAGGSGLSSPQSMILDLLEQNDERKIVLFQGARNLAELYNRELFEALDRDHDNFTYVPALSQADEDPDWKGFRGYVHEAANAHFDGRFAGNKAYLCGPPPMIDAAITALMQGRLFERDIFMEKFLTAADGAEDTQRSALFKKI

SEQ ID NO: 265 - DNA, 1998 bp, Cutaneotrichosporon cutaneum
atgaccaagtacagcgaatcctactgcgacgtcctcatcgttggtgccggccccgccggtttgatggccgcccgcgtcctctcagagtacgtgcgccagaagcccgacctcaaggtccgcatcatcgacaagcgctcgaccaaggtctacaatggccaggcagacggtctccagtgccgtaccctcgagtctctaaagaaccttggtcttgccgacaagatcctctcggaggcaaacgacatgtcgacgatcgcgctctacaaccccgacgagaatggacacattcgtcgcaccgaccgcatcccagacaccctccccggcatctcgcgctaccaccaggtcgtgctccaccaaggccggattgagaggcacatcctcgactcgattgcggagatttcggacacccgtatcaaggtcgagcggccgctcatccccgagaagatggagatcgacagctccaaggctgaggaccccgaggcctaccccgtcacgatgactctccgctacatgagtgaccacgagtcgactcctctacagttcgggcacaagaccgagaacagcctcttccactccaacctccagacccaggaggaggaggatgccaactaccgcctccccgagggcaaggaggcgggcgagatcgagaccgttcactgcaagtacgttatcggctgtgacggtggccactcatgggtccgccgcactctcggcttcgagatgattggcgagcagaccgactacatctggggtgttcttgacgctgtcccggcctccaacttccccgacattcgctcgccgtgcgccatccactctgccgagtctggctcgatcatgatcatcccgcgcgagaacaatctcgtccgcttctacgttcagctccaggcccgcgctgagaagggcgggcgcgtcgaccgcaccaagtttactcccgaggtcgtcattgccaacgcaaagaaaatcttccacccctacacctttgatgtccagcagctcgactggtttactgcctatcacattggccagcgtgttactgagaagttctcgaaggacgagcgcgtgttcatcgccggtgacgcttgccacacccattcgcccaaggccggccagggcatgaacacgtcaatgatggacacctacaacctcggctggaagctcggtctcgtactcactggccgtgccaagcgcgacatcctcaagacgtacgaggaggagcgccacgcattcgcacaggccctcatcgactttgaccaccagttctcgcgcctcttctcgggccgcccggctaaggacgtggccgatgagatgggcgtctcgatggacgtgttcaaggaggcattcgtcaagggcaacgagttcgcctcgggcaccgctatcaactacgacgagaacctcgtgaccgacaagaagagttccaagcaggagcttgccaagaactgcgttgtcggaacccgcttcaagtcgcaacccgttgtccgccactctgagggcctctggatgcactttggcgaccgcctcgtcaccgacggccgattccgcatcattgtcttcgccggcaaggctaccgatgccacccagatgtcccgcattaagaagttttccgcctacctcgactcggagaactcggtcatctcgctctacacccccaaggtctctgaccgcaactcgcgcatcgacgtcatcaccattcactcctgccaccgcgatgacatcgagatgcacgacttccccgcaccggctctccaccccaagtggcaatatgacttcatctacgccgactgcgactcatggcaccacccccaccccaagtcctaccaggcctggggcgtcgacgagaccaagggtgccgtcgtggtcgtccgcccagacggctacacctcgctcgtgaccgacctcgagggcaccgccgagattgaccgctacttcagcggtatccttgtcgagcccaaggagaagtccggagcccagaccgaggccgactggaccaagtcaactgcataa

SEQ ID NO: 266 - protein, 665 aa, Cutaneotrichosporon cutaneum
MTKYSESYCDVLIVGAGPAGLMAARVLSEYVRQKPDLKVRIIDKRSTKVYNGQADGLQCRTLESLKNLGLADKILSEANDMSTIALYNPDENGHIRRTDRIPDTLPGISRYHQVVLHQGRIERHILDSIAEISDTRIKVERPLIPEKMEIDSSKAEDPEAYPVTMTLRYMSDHESTPLQFGHKTENSLFHSNLQTQEEEDANYRLPEGKEAGEIETVHCKYVIGCDGGHSWVRRTLGFEMIGEQTDYIWGVLDAVPASNFPDIRSPCAIHSAESGSIMIIPRENNLVRFYVQLQARAEKGGRVDRTKFTPEVVIANAKKIFHPYTFDVQQLDWFTAYHIGQRVTEKFSKDERVFIAGDACHTHSPKAGQGMNTSMMDTYNLGWKLGLVLTGRAKRDILKTYEEERHAFAQALIDFDHQFSRLFSGRPAKDVADEMGVSMDVFKEAFVKGNEFASGTAINYDENLVTDKKSSKQELAKNCVVGTRFKSQPVVRHSEGLWMHFGDRLVTDGRFRIIVFAGKATDATQMSRIKKFSAYLDSENSVISLYTPKVSDRNSRIDVITIHSCHRDDIEMHDFPAPALHPKWQYDFIYADCDSWHHPHPKSYQAWGVDETKGAVVVVRPDGYTSLVTDLEGTAEIDRYFSGILVEPKEKSGAQTEADWTKSTA

SEQ ID NO: 267 - DNA, 978 bp, Asparagus officinalis
atgaacacgggcattcaggatgcccataatttagcctggaaaataagctgtttgttgaaagatgctgcttcgccttcccttataaaaacttatgagtcagagcgtagaccaattgccatctccaacactgcattaagtgttaataacttcaaagcagctatgtcagttcctgctgcacttggtattgatccaactgttgcaaatacagttcatcaggtaataaacagtagttttggatccattcttccttctactttccaaaaagctgccctggaaggaattttttccattggccgggcacaactctcggactttgttctgaatgaaaacaatccacttggttcttcaaggcttgctaggctgagggctatatttgatgaggggaagattggtttcaggtaccttaagggagctctggtagctgacagtgacaacgaaacacaagaaacggtagaaactgctgctacctataagagagggtcaagggactatgttccctccggtaaacctggatcgagattgccacatatgcaactgaggatgttgaatgcatcagaaaatgaggattctatctcaaccttggatctaatatctgtagaaaaactagaattccttctgattattgcaccgttgaaagactcctacgatgttgctcgtgtggcctttaaggtagcagaaacactcagagtctcacttaaggtttgtgtgatctgggctcaaggttcggctcctgctgatgcttctggaagtggacaggaagtggagccctggaaaaattatgtagatgttgaagaaattcagaggtcaaactcaaagtcatggtgggaggtgtgtcaaatgtcgaacaggggggtcattttggtcagacctgatgatcatattgcatggagtacagagattgattctgttgagaatattgtgcaacaagtggaaagagtcttcttcctaatattaggggcggtgaggacctcttcgtag

SEQ ID NO: 268 - protein, 325 aa, Asparagus officinalis
MNTGIQDAHNLAWKISCLLKDAASPSLIKTYESERRPIAISNTALSVNNFKAAMSVPAALGIDPTVANTVHQVINSSFGSILPSTFQKAALEGIFSIGRAQLSDFVLNENNPLGSSRLARLRAIFDEGKIGFRYLKGALVADSDNETQETVETAATYKRGSRDYVPSGKPGSRLPHMQLRMLNASENEDSISTLDLISVEKLEFLLIIAPLKDSYDVARVAFKVAETLRVSLKVCVIWAQGSAPADASGSGQEVEPWKNYVDVEEIQRSNSKSWWEVCQMSNRGVILVRPDDHIAWSTEIDSVENIVQQVERVFFLILGAVRTSS

SEQ ID NO: 269 - DNA, 936 bp, Pseudomonas sp. JR1 3
atgggcattaaaagcttgggttacatggggttctctgtaagtgatgtaccggcatggcgctcgttcctcaccgaaaaagtgggtttgatggaggttgttggctccgatgagaatgccttataccgcatggactcacgcagttggcggattgccgtggaaaggggggaggctgacgacctagcattcgccggttatgaagttgccaatccgctggccttgaagctgattacggagcggctacgggaggctggtgttcaggtgaggaccggcgacactgaactggcagaaaagcgtggcgtgatggaactggtctcttttgaagatccatttggaatgccgctggaaatttactacggggctaccgaactattcgagcagcctttcgtttctggcacttgtgtcactgggttcctgactggtgaccaaggagctgggcattatttttatgctgtcccggatattgaagaaggactggctttctatactggcatactgggtttccagatgtccgacgtcattgatatagctatgggtccggatattacagtgcggggatactttcttcattgcaacgggcgccaccacacaatggcgatcgcggaggctccgttacccaagagagttcaccattttttgctgcaggccttgacgctggatgatgtaggtcatgcgtacgaccgaatcgatggattgggcgacaaatctaccgactccaatcttcgggtgccggcaaatagtgatattaggtccagcaggatcacggcgacgatcggacgccatgtcaacgatcacatgatttccttttacgctgagacgccgtccgggtttgagcttgagtttggttggggcgcgcgcgacgtagatgaccggtcttgggtgatgacgaggcacaagcgcacggccatgtggggtcataaatctatgcgtaataagtaa

SEQ ID NO: 270 - protein, 311 aa, Pseudomonas sp. JR1 3
MGIKSLGYMGFSVSDVPAWRSFLTEKVGLMEVVGSDENALYRMDSRSWRIAVERGEADDLAFAGYEVANPLALKLITERLREAGVQVRTGDTELAEKRGVMELVSFEDPFGMPLEIYYGATELFEQPFVSGTCVTGFLTGDQGAGHYFYAVPDIEEGLAFYTGILGFQMSDVIDIAMGPDITVRGYFLHCNGRHHTMAIAEAPLPKRVHHFLLQALTLDDVGHAYDRIDGLGDKSTDSNLRVPANSDIRSSRITATIGRHVNDHMISFYAETPSGFELEFGWGARDVDDRSWVMTRHKRTAMWGHKSMRNK

SEQ ID NO: 271 - DNA, 924 bp, Pseudomonas putida
atgaagaagggagtaatgcgaccaggccacgtgcaactacgagtgctcaacctagaggcggcgcttactcactacagggatcttcttggtctaatcgaaatggaccgagacgaacaaggaagagtctatctcaaggcttggtcggaagtggacaagttttcagtggtccttcgtgaagctgatcagccaggaatggacttcatgggttttaaggtcaccgatgatgcctgtcttactcgtttagcaggcgaactcctcgaatttggatgccaggttgaagagatccccgcgggagagttaaaagactgtggtaggagagtacgatttcttgccccgtctggacatttctttgagctttatgctgagaaagaatatacgggtaaatggggcatcgaggaagttaaccctgaagcatggcctagggacctgaagggaatgagagcggtgaggttcgaccactgcttgatgtacggagatgagcttcaagccacatacgagctattcacagaagttttgggattttacttggctgagcaagttatcgaggataatggcacacgaatatctcagtttctttccttgagtaccaaggctcacgacgttgcattcatacagcacgctgaaaagggaaaattccatcacgttagtttctttctcgaaacttgggaagatgtccttcgagcagcagacttgatttccatgacagacacttcaatagacataggcccgaccagacatggcctaactcacggtaaaacgatttatttctttgacccgtcaggaaacagaaatgaagtattttgcggtggcgactataactatcctgaccacaagcctgttacctggacagcggaccaattgggcaaggctattttctaccatgatcgtattttaaatgaaagatttatgacagtcctgacttga

SEQ ID NO: 272 - protein, 307 aa, Pseudomonas putida
MKKGVMRPGHVQLRVLNLEAALTHYRDLLGLIEMDRDEQGRVYLKAWSEVDKFSVVLREADQPGMDFMGFKVTDDACLTRLAGELLEFGCQVEEIPAGELKDCGRRVRFLAPSGHFFELYAEKEYTGKWGIEEVNPEAWPRDLKGMRAVRFDHCLMYGDELQATYELFTEVLGFYLAEQVIEDNGTRISQFLSLSTKAHDVAFIQHAEKGKFHHVSFFLETWEDVLRAADLISMTDTSIDIGPTRHGLTHGKTIYFFDPSGNRNEVFCGGDYNYPDHKPVTWTADQLGKAIFYHDRILNERFMTVLT

SEQ ID NO: 273 - DNA, 924 bp, Burkholderia sp. DBT1 O
atggaaaacattggggtcacagaattaggttatatcggaatcggcgtcagcgacatggacgcgtggcgggaatatgccgcgaacgtcatgggtctggaggtgctcgaggagggcgacaaagatcgattctatttgcgcctcgattatcagcaccatcggatcgtggttcataattcggggagcgatgacttggactacgctggctggcgagttgcaggccctgaagaatttgaccagatcaaacgcaatctcgagaaagccagagtcgattttcggcaagccgatgcagcagagtgcgacgagcgtatggtgttggatcttgtcaaattcctcgatccgggcggtaaccctacagaaatctatcatggcccgcgggttgactatcacaaacccttccatgctggccgcagaatgcacggccgtttctcgaccggtgatcaagggctcggtcatatcggtcatatcattctacgacaggaaaatccacaaaaggcatacgaattctacgcaagagttttgggcatgcgtggatccgtcgagtatcacataccgattccacacatcggaattactgcgaagcccatttttttgcattccaacgatcgagaccattcggttgcatttttaggtgggccagcggccaagcgaatcaatcatttgatgatcgaagtcgacaatatcgacgacgttggctatacgcacgatattgtcaggaaacggcagatcccggtcgccgtgcagctcggcaaacattcgaatgatcaaatggtcagcttttattcggcaaacccatctaattggctgttcgaatatggcgcattaggacgtagagcgacctatcagtcggaatattatgtttcggacatctgggggcatgaaattgaagcaactggatacggccttgacgtcaaattgaaagaataa

SEQ ID NO: 274 - protein, 307 aa, Oryza sativa
MENIGVTELGYIGIGVSDMDAWREYAANVMGLEVLEEGDKDRFYLRLDYQHHRIVVHNSGSDDLDYAGWRVAGPEEFDQIKRNLEKARVDFRQADAAECDERMVLDLVKFLDPGGNPTEIYHGPRVDYHKPFHAGRRMHGRFSTGDQGLGHIGHIILRQENPQKAYEFYARVLGMRGSVEYHIPIPHIGITAKPIFLHSNDRDHSVAFLGGPAAKRINHLMIEVDNIDDVGYTHDIVRKRQIPVAVQLGKHSNDQMVSFYSANPSNWLFEYGALGRRATYQSEYYVSDIWGHEIEATGYGLDVKLKE

SEQ ID NO: 275 - DNA, 945 bp, Ralstonia pickettii
atgggtgttctacgaatcggcatgcggccggtcgtggcagggagcttcgggcagcatcaccgtcttcaggccccacgcttcgatcttggcctgcagctcgtcgaggtcggcatccttctcgaccttgtaggcgaggtggttgaggccggcctgatccgacggcgtgaggatgagcgaatacttgtcccactcgtcccagcacttgaagtagacgttgccggcgttgtcctgcatcgtcaccttcatgccgagcacgttttcgtagtgccgcacggcggcggccatgtccatcaccttcaggctggcatgctgcagttcaatctgccgagcggtcacgagatgcggctctatgcgatgaaggaggtggtcggcaccgaggtgggcagccgcaaccccgacccgtggcccgacaacctcaagggcgctggcgtgcactggctggatcatgccctgttgatgtgcgagttgaacccggaagccggcgtcaacacggttgccgataacacgcgcttcatgcaggaggtgctgggcttcttcctgacggagcaggtggtcgtcggcccggacggttgcgtacaggcggctgcacggctggcccgcagcaccacgccgcacgacatcgcattcgtcggtggtccgcgcagcggcctgcaccacattgccttcttcctggactcgtggcacgacgtgctgaaggccgcggatgtcatggccaagaaccagacgaagatcgacgtggcacccacgcgtcacggcatcacgcgcgggcagacgatctacttcttcgaccccagcggcaaccgcaacgagacattcgccggcctgggctacctcgcgcagccggatcgtcccgtcaccacgtggagtgaagacaagctgtggaccggcatcttctaccacaccggcgatacgctggtgccgtcgttcaccgatgtgtacacctga

SEQ ID NO: 276 - protein, 314 aa, Ralstonia pickettii
MGVLRIGMRPVVAGSFGQHHRLQAPRFDLGLQLVEVGILLDLVGEVVEAGLIRRREDERILVPLVPALEVDVAGVVLHRHLHAEHVFVVPHGGGHVHHLQAGMLQFNLPSGHEMRLYAMKEVVGTEVGSRNPDPWPDNLKGAGVHWLDHALLMCELNPEAGVNTVADNTRFMQEVLGFFLTEQVVVGPDGCVQAAARLARSTTPHDIAFVGGPRSGLHHIAFFLDSWHDVLKAADVMAKNQTKIDVAPTRHGITRGQTIYFFDPSGNRNETFAGLGYLAQPDRPVTTWSEDKLWTGIFYHTGDTLVPSFTDVYT

SEQ ID NO: 277 - DNA, 936 bp, Pseudomonas putida
atgaccgtgaaaatttcccacactgccgatgttcaagccttcttcaacaaggtggctggcctggaccatgccgagggcaacccacgcttcaagcagatcatcctgcgcgtcctgcaggacaccgcgcgcctggtcgaagacctggaaatcaccgaagacgaattctggcacgccattgactacctcaaccgcctgggcggccgtaacgaggcgggcctgctggccgcaggcctgggtatcgagcacttcctcgacctgctgcaggacgccaaggacgccgaagccggcttgggtggcggcacaccgcgcaccatcgaaggcccgctgtacgtggccggtgcgccgctggcgcaaggcgaagcgcgcatggatgacggcaccgatccgggtgtggtgatgttccttcagggccaggtgttcgatgccgacggcaagccgctcgccggtgccaccgtcgacctctggcacgccaacacccagggcacttattcgtacttcgattcgactcagtccgaatacaacctgcgccgccgcatcatcaccgatgccgtgggccgctaccgtgcgcgctccatcgtgccgtcggggtacggctgcgacccgcagggcacgacccaggaatgcctggacctgctcggccgccacggccagcgcccggcgcacgtgcacttcttcatctcggcacctgggttccgccacctgaccacgcagatcaacttgaagatgccgctgccgcgcgtgatcgcggtgttcagggcgagcgctttgccgaactgcgagggcgacaagtacctgtgggatgacttcgcctacgccacccgtgacgggttgattggcgagctgcgctttgtcgcgttcgacttccacctgcaggcggctgcagcgccggaggccgaagcgcgcagccatcggccgcgtgcgttgcaggagggctga

SEQ ID NO: 278 - protein, 311 aa, Pseudomonas putida
MTVKISHTADVQAFFNKVAGLDHAEGNPRFKQIILRVLQDTARLVEDLEITEDEFWHAIDYLNRLGGRNEAGLLAAGLGIEHFLDLLQDAKDAEAGLGGGTPRTIEGPLYVAGAPLAQGEARMDDGTDPGVVMFLQGQVFDADGKPLAGATVDLWHANTQGTYSYFDSTQSEYNLRRRIITDAVGRYRARSIVPSGYGCDPQGTTQECLDLLGRHGQRPAHVHFFISAPGFRHLTTQINLKMPLPRVIAVFRASALPNCEGDKYLWDDFAYATRDGLIGELRFVAFDFHLQAAAAPEAEARSHRPRALQEG

SEQ ID NO: 279 - DNA, 930 bp, Pseudomonas reinekei
atgaacgtcaaaatttcccacactgctgaagtccagaattttctcgaagaggccagcggcctgcacaacgacgccggcaatccacggaccaaggcgctgatctatcgcatcctgcgtgactcggtgaacatcatcgaagacctcgccgtgaccccggaagagttctggaaagcggtcaactacctgaacgtgctgggtgcgcgtcaggaagccggactggtggtggccggtcttggtctggagcactacctcgacctgctgatggacgccgaagacgagcaggccggcaaatccggcggcaccccgcgtaccatcgaaggcccgctgtacgtggcgggtgcaccattgtccgaaggcgaagcgcgcctggatgacggggttgatccgggtgtgaccctgttcatgcaaggccgcgtgttcaacaccgcaggcgagcctctggccggtgccgtggtggacgtctggcacgccaataccggcggtacctactcgtacttcgacccggcccaatcggaattcaacctgcgtcgccgcatcgtcaccgacgccgatggccgctaccgtttccgcagcatcgtgccgtcgggttacggctgcccgccggacggtccgacccagcaactgctcgatcaactgggccgtcatggccagcgtccggcgcacgtgcacttcttcatttccgcaccggatcatcgccacctgacgacgcagatcaacctcgatggcgaaaaatacctgcatgacgacttcgcttacgccacccgtgacgagctgatcgccaagatcaccttcagcgacgatcagcagcgcgccgctgcctacggtgtgagcggtcgctttgccgaaatcgagttcgatttcaccctgcaatcgtctgcccagcctgaagaacaacagcgccacgagcgggttcgcgcactggaagactga

SEQ ID NO: 280 - protein, 309 aa, Pseudomonas reinekei
MNVKISHTAEVQNFLEEASGLHNDAGNPRTKALIYRILRDSVNIIEDLAVTPEEFWKAVNYLNVLGARQEAGLVVAGLGLEHYLDLLMDAEDEQAGKSGGTPRTIEGPLYVAGAPLSEGEARLDDGVDPGVTLFMQGRVFNTAGEPLAGAVVDVWHANTGGTYSYFDPAQSEFNLRRRIVTDADGRYRFRSIVPSGYGCPPDGPTQQLLDQLGRHGQRPAHVHFFISAPDHRHLTTQINLDGEKYLHDDFAYATRDELIAKITFSDDQQRAAAYGVSGRFAEIEFDFTLQSSAQPEEQQRHERVRALED

SEQ ID NO: 281 - DNA, 936 bp, Pseudomonas reinekei
atgaccgtaaaaatcagccacaccgctgaagtgcaggacctgatcaaggaggccgccggtttcaacagcgaccagggcagcccgcgcctcaagcaactgatgcatcgcctgatcagcgacgccttcaagatcatcgaagacctggaagtgaccgaagacgaattctggttggcggtggatcgcctgaacaaggtcggcgcccacgctgagttcggcttgctgctgccgggcctgagcatggagcacttcatggacctgctgcaggacgccaaggaccagcagataggcctggccggcgggaccccgcggaccatcgaagggcctctgtacgtggctaacgcgccgctcagcgaaggttttgcgcgcatggatgatggcagtgaagatgacgtcggcatcccgctgttcatcaagggtacggtcctcaatacggacggcaagccggtggccggtgcgatcgttgatctgtggcacgccaacaccaatggcacctactcctacttcgacgagagtcagtcggcgttcaacctgcgtcgccggatcaagaccgacgctgaaggccgttacaccgcgcgcagcatcattccgagcggttacggtgtgaatcccgaagggccgacccaggaatgcctgagcgccctgggccgccacggtcagcgcccggcacatatccatgtgttcgtttccgcaccggaacatcgtcatctgaccagccagatcaaccttgccggcgacaaatacctgtgggacgacttcgcctacgccacccgtgaagggctggtcggcgaagccagactgctcgacaacgccgacgcctcgaaagcccatggtctggacgggcgacagttcgctgaactcgaattcgacttcgttctgcaaccggcggtcaacgccgacgatgaacaccgcagccagcgtccacgcgccggccaatga

SEQ ID NO: 282 - protein, 311 aa, Pseudomonas reinekei
MTVKISHTAEVQDLIKEAAGFNSDQGSPRLKQLMHRLISDAFKIIEDLEVTEDEFWLAVDRLNKVGAHAEFGLLLPGLSMEHFMDLLQDAKDQQIGLAGGTPRTIEGPLYVANAPLSEGFARMDDGSEDDVGIPLFIKGTVLNTDGKPVAGAIVDLWHANTNGTYSYFDESQSAFNLRRRIKTDAEGRYTARSIIPSGYGVNPEGPTQECLSALGRHGQRPAHIHVFVSAPEHRHLTSQINLAGDKYLWDDFAYATREGLVGEARLLDNADASKAHGLDGRQFAELEFDFVLQPAVNADDEHRSQRPRAGQ

SEQ ID NO: 283 - DNA, 20 bp, Artificial Sequence
  Primer Sequence
attcctctgccacggctatc

SEQ ID NO: 284 - DNA, 20 bp, Artificial Sequence
  Primer Sequence
ttcttcccgcttcgaggtct

SEQ ID NO: 285 - DNA, 19 bp, Artificial Sequence
  Primer Sequence
gctgcctgacgctatgagg

SEQ ID NO: 286 - DNA, 21 bp, Artificial Sequence
  Primer sequence
gattccttggagtctgcctag

SEQ ID NO: 287 - DNA, 20 bp, Artificial Sequence
  Primer Sequence
tggaggatttaagtctaggt

SEQ ID NO: 288 - DNA, 20 bp, Artificial Sequence
  Primer Sequence
cccaaagtcaaattatgagt

SEQ ID NO: 289 - DNA, 20 bp, Artificial Sequence
  Primer sequence
tcaaccttcagccaatacac

SEQ ID NO: 290 - DNA, 20 bp, Artificial Sequence
  Primer Sequence
gtcaatgtcaatgccaataa

SEQ ID NO: 291 - DNA, 23 bp, Artificial Sequence
  Primer Sequence
tggattgggagctgtttggaata

SEQ ID NO: 292 - DNA, 23 bp, Artificial Sequence
  Primer Sequence
tcctccatcagtcaaatcaacca

SEQ ID NO: 293 - DNA, 21 bp, Artificial Sequence
  Primer Sequence
ctgatgatggctatattgtgg

SEQ ID NO: 294 - DNA, 20 bp, Artificial Sequence
  Primer Sequence
ttacttctgtgttgagcatt

SEQ ID NO: 295 - DNA, 23 bp, Artificial Sequence
  Primer Sequence
cgtatggattcaatctcggtgga

SEQ ID NO: 296 - DNA, 23 bp, Artificial Sequence
  Primer Sequence
atcgcctctatttggtcaggtac

SEQ ID NO: 297 - DNA, 22 bp, Artificial Sequence
  Primer Sequence
ttgactgcgacctgaacgacct

SEQ ID NO: 298 - DNA, 20 bp, Artificial Sequence
  Primer Sequence
cgggacagagactataccac

SEQ ID NO: 299 - DNA, 22 bp, Artificial Sequence
  Primer Sequence
catgaaggtgccagaaggaatg

SEQ ID NO: 300 - DNA, 23 bp, Artificial Sequence
  Primer Sequence
gcaccctgtcctttggtaatttc

SEQ ID NO: 301 - DNA, 19 bp, Artificial Sequence
  Primer Sequence
cagagcattgcgacatcgg

SEQ ID NO: 302 - DNA, 18 bp, Artificial Sequence
  Primer Sequence
aacattcacagcgagcac

SEQ ID NO: 303 - DNA, 24 bp, Artificial Sequence
  Primer Sequence
gcaagcagagtatttaagagtgcc

SEQ ID NO: 304 - DNA, 23 bp, Artificial Sequence
  Primer Sequence
aaagatcgattgtctcagcacca

SEQ ID NO: 305 - DNA, 20 bp, Artificial Sequence
  Primer Sequence
tggaatcactttgcgtcagg

SEQ ID NO: 306 - DNA, 20 bp, Artificial Sequence
  Primer Sequence
agtttgaggttcgcgtctgg

SEQ ID NO: 307 - DNA, 23 bp, Artificial Sequence
  Primer Sequence
ctttgcaacactgaaggaagcta

SEQ ID NO: 308 - DNA, 23 bp, Artificial Sequence
  Primer Sequence
gcctttgctccattctccaatat

SEQ ID NO: 309 - DNA, 20 bp, Artificial Sequence
  Primer Sequence
gggaagcgaactcgaacagg

SEQ ID NO: 310 - DNA, 20 bp, Artificial Sequence
  Primer Sequence
ttcttgctgatttcggatgg

SEQ ID NO: 311 - DNA, 20 bp, Artificial Sequence
  Primer Sequence
aagaggtaaggtcccgactg

SEQ ID NO: 312 - DNA, 20 bp, Artificial Sequence
  Primer Sequence
tttcttgctgatttcggatg

SEQ ID NO: 313 - DNA, 20 bp, Artificial Sequence
  Primer Sequence
gaggtaaggtcccgactgtg

SEQ ID NO: 314 - DNA, 23 bp, Artificial Sequence
  Primer Sequence
tgtaattggaacgtgatcgaggt

SEQ ID NO: 315 - DNA, 23 bp, Artificial Sequence
  Primer Sequence
cttttgcaggaatgtccgagaag

SEQ ID NO: 316 - DNA, 19 bp, Artificial Sequence
  Primer Sequence
ccgcattaacttcgctctt

SEQ ID NO: 317 - DNA, 19 bp, Artificial Sequence
  Primer Sequence
gcacgtcccgcattagcct

SEQ ID NO: 318 - DNA, 23 bp, Artificial Sequence
  Primer Sequence
tacgcaaaattcagctcaggttg

SEQ ID NO: 319 - DNA, 24 bp, Artificial Sequence
  Primer Sequence
tcatatctaatgcggtaaccaagc

SEQ ID NO: 320 - DNA, 23 bp, Artificial Sequence
  Primer Sequence
tcgataagaacgatgaggtggtg

SEQ ID NO: 321 - DNA, 23 bp, Artificial Sequence
  Primer Sequence
tctcctgtctttgtagcgttcaa

SEQ ID NO: 322 - DNA, 19 bp, Artificial Sequence
  Primer Sequence
acgacggagcagaagcgac

SEQ ID NO: 323 - DNA, 18 bp, Artificial Sequence
  Primer Sequence
cgtcagtgataccggaaa

SEQ ID NO: 324 - DNA, 21 bp, Artificial Sequence
  Primer Sequence
gatggttaacaacatgggcgg

SEQ ID NO: 325 - DNA, 23 bp, Artificial Sequence
  Primer Sequence
tgagtatatcaccaccagccttg

SEQ ID NO: 326 - DNA, 20 bp, Artificial Sequence
  Primer sequence
agcggtggagaagcgttaga

SEQ ID NO: 327 - DNA, 20 bp, Artificial Sequence
  Primer sequence
tgaagtgccgcccattgagt

SEQ ID NO: 328 - DNA, 23 bp, Artificial Sequence
  Primer sequence
ttaactttgaaacagcgaccgag

SEQ ID NO: 329 - DNA, 21 bp, Artificial Sequence
  Primer sequence
catcgacggtttgatcaaggg

SEQ ID NO: 330 - DNA, 19 bp, Artificial Sequence
  Primer sequence
aataatcaaggccactcaa

SEQ ID NO: 331 - DNA, 20 bp, Artificial Sequence
  Primer sequence
catgaatgccgacgccaaac

SEQ ID NO: 332 - DNA, 19 bp, Artificial Sequence
  Primer sequence
ggtggcatcaagctagaaa

SEQ ID NO: 333 - DNA, 19 bp, Artificial Sequence
  Primer sequence
tccaccaccgacgataacc

SEQ ID NO: 334 - DNA, 19 bp, Artificial Sequence
  Primer sequence
aagcaggtgccgatttggt

SEQ ID NO: 335 - DNA, 20 bp, Artificial Sequence
  Primer sequence
tccggctatagttgagtcgt

SEQ ID NO: 336 - DNA, 22 bp, Artificial Sequence
  Primer sequence
gacttgcaggctgttggaaaaa

SEQ ID NO: 337 - DNA, 23 bp, Artificial Sequence
  Primer sequence
tcataaggccctgtttcacaagt

SEQ ID NO: 338 - DNA, 23 bp, Artificial Sequence
  Primer sequence
tacgatccctgctgtccaaaaag

SEQ ID NO: 339 - DNA, 18 bp, Artificial Sequence
  Primer sequence
ggtccaccttggctgctg

SEQ ID NO: 340 - DNA, 19 bp, Artificial Sequence
  Primer sequence
acaacagggcggtaaagtc

SEQ ID NO: 341 - DNA, 19 bp, Artificial Sequence
  Primer sequence
tcgcaatataatctgtcgg

SEQ ID NO: 342 - DNA, 23 bp, Artificial Sequence
  Primer sequence
gccggtggattaaatctggaaac

SEQ ID NO: 343 - DNA, 23 bp, Artificial Sequence
  Primer sequence
cattgcatccactagacctctca

SEQ ID NO: 344 - DNA, 19 bp, Artificial Sequence
  Primer sequence
acaatagcagcggtgacaa

SEQ ID NO: 345 - DNA, 18 bp, Artificial Sequence
  Primer sequence
taccgcgtcataaaacaa

SEQ ID NO: 346 - DNA, 20 bp, Artificial Sequence
  Primer sequence
gccgctttcacaaccaatcc

SEQ ID NO: 347 - DNA, 19 bp, Artificial Sequence
  Primer sequence
agcgaaccagcatactgac

SEQ ID NO: 348 - DNA, 23 bp, Artificial Sequence
  Primer sequence
atatgttggatcggacagaagca

SEQ ID NO: 349 - DNA, 22 bp, Artificial Sequence
  Primer sequence
ccagcatcaaattgggatctcc

SEQ ID NO: 350 - DNA, 24 bp, Artificial Sequence
  Primer sequence
gatctcccacgtagaaaccagatc

SEQ ID NO: 351 - DNA, 25 bp, Artificial Sequence
  Primer sequence
gatctggatacttatctcggtgagg

SEQ ID NO: 352 - DNA, 29 bp, Artificial Sequence
  Primer sequence
gagcaacaatccattctaacataaattcc

SEQ ID NO: 353 - DNA, 25 bp, Artificial Sequence
  Primer sequence
tcacacatttgcatctctaatttcg

SEQ ID NO: 354 - DNA, 25 bp, Artificial Sequence
  Primer sequence
ggacccgttaaaactgtgaacaatt

SEQ ID NO: 355 - DNA, 25 bp, Artificial Sequence
  Primer sequence
ttgatgacatgatgaacacacgtag

SEQ ID NO: 356 - DNA, 25 bp, Artificial Sequence
  Primer sequence
gtctcctatccgtgtatcagttgtt

SEQ ID NO: 357 - DNA, 25 bp, Artificial Sequence
  Primer sequence
cttacattctatgatgatggctggc

SEQ ID NO: 358 - DNA, 23 bp, Artificial Sequence
  Primer sequence
tttatcgctcgcacctagacttg

SEQ ID NO: 359 - DNA, 25 bp, Artificial Sequence
  Primer sequence
ttctccaaacaagattccacagttg

SEQ ID NO: 360 - DNA, 25 bp, Artificial Sequence
  Primer sequence
ttctccaaacaagattccacagttg

SEQ ID NO: 361 - DNA, 25 bp, Artificial Sequence
  Primer sequence
gaagaaggttgatattgcgttttgg

SEQ ID NO: 362 - DNA, 25 bp, Artificial Sequence
  Primer sequence
aaggtaatcaatcgagctgaaggaa

SEQ ID NO: 363 - DNA, 25 bp, Artificial Sequence
  Primer sequence
tgtctcaatcgtctcattagcaaga

SEQ ID NO: 364 - DNA, 17 bp, Artificial Sequence
  Primer sequence
cagcaccaacttgtacg

SEQ ID NO: 365 - DNA, 17 bp, Artificial Sequence
  Primer sequence
gcactgttgatagggtc

SEQ ID NO: 366 - DNA, 20 bp, Artificial Sequence
  Primer sequence
gttcgactgctccaatatgc

SEQ ID NO: 367 - DNA, 20 bp, Artificial Sequence
  Primer sequence
tacacttgaatcgacaccct

SEQ ID NO: 368 - DNA, 20 bp, Artificial Sequence
  Primer sequence
atccgcacaaaggcaattag

SEQ ID NO: 369 - DNA, 17 bp, Artificial Sequence
  Primer sequence
caacatgaaagcgtaag

SEQ ID NO: 370 - DNA, 23 bp, Artificial Sequence
  Primer sequence
actgggaaactatgtcgtacagg

SEQ ID NO: 371 - DNA, 23 bp, Artificial Sequence
  Primer sequence
tctgccctacatttgtaacgaca

SEQ ID NO: 372 - DNA, 23 bp, Artificial Sequence
  Primer sequence
taatgtttagaagcgacaaggcc

SEQ ID NO: 373 - DNA, 23 bp, Artificial Sequence
  Primer sequence
aagcctttctgaaaaagtctcgc

SEQ ID NO: 374 - DNA, 20 bp, Artificial Sequence
  Primer sequence
gcataaacgacgacggagac

SEQ ID NO: 375 - DNA, 20 bp, Artificial Sequence
  Primer sequence
ctactcacctcttcggaaca

SEQ ID NO: 376 - DNA, 18 bp, Artificial Sequence
  Primer sequence
tggtgtccgcgtcctatg

SEQ ID NO: 377 - DNA, 20 bp, Artificial Sequence
  Primer sequence
agtaatgagacgggtcgttg

SEQ ID NO: 378 - DNA, 19 bp, Artificial Sequence
  Primer sequence
gccgcttcttcctatcacc

SEQ ID NO: 379 - DNA, 20 bp, Artificial Sequence
  Primer sequence
ctcatatcctgacccgtctt

SEQ ID NO: 380 - DNA, 19 bp, Artificial Sequence
  Primer sequence
gggctcactgacaacctac

SEQ ID NO: 381 - DNA, 19 bp, Artificial Sequence
  Primer sequence
cgcacctcaattctatgac

SEQ ID NO: 382 - DNA, 20 bp, Artificial Sequence
  Primer sequence
gaagccgacgaagaacgaca

SEQ ID NO: 383 - DNA, 20 bp, Artificial Sequence
  Primer sequence
cggcacaatccagattatca

SEQ ID NO: 384 - DNA, 20 bp, Artificial Sequence
  Primer sequence
tacagtgcccatctacgaag

SEQ ID NO: 385 - DNA, 16 bp, Artificial Sequence
  Primer sequence
cccgttcagccgttgt

SEQ ID NO: 386 - DNA, 20 bp, Artificial Sequence
  Primer sequence
cttcagcttggcggtctggg

SEQ ID NO: 387 - DNA, 19 bp, Artificial Sequence
  Primer sequence
cgcctacaacgtcaacatc

SEQ ID NO: 388 - DNA, 19 bp, Artificial Sequence
  Primer sequence
cggcgcgttcgtactgttc

SEQ ID NO: 389 - DNA, 23 bp, Artificial Sequence
  Primer sequence
tctccataccttctttctcacgt

SEQ ID NO: 390 - DNA, 23 bp, Artificial Sequence
  Primer sequence
ctcaacagtagcgttagacctga

SEQ ID NO: 391 - DNA, 23 bp, Artificial Sequence
  Primer sequence
aacctggcgtgactttatttgtg

SEQ ID NO: 392 - DNA, 23 bp, Artificial Sequence
  Primer sequence
tgacgcctctcaaaataccttgt

SEQ ID NO: 393 - DNA, 21 bp, Artificial Sequence
  Primer sequence
aagacctgcctgaaaccgaac

SEQ ID NO: 394 - DNA, 22 bp, Artificial Sequence
  Primer sequence
ggacattgttggagccgaaatc

SEQ ID NO: 395 - DNA, 26 bp, Artificial Sequence
  Primer sequence
tcattacattgagacttctactgtga

SEQ ID NO: 396 - DNA, 23 bp, Artificial Sequence
  Primer sequence
caatcacagcaaccacagacttg

SEQ ID NO: 397 - DNA, 24 bp, Artificial Sequence
  Primer sequence
cggtaaggatctgagctacacatg

SEQ ID NO: 398 - DNA, 24 bp, Artificial Sequence
  Primer sequence
ccacagtcgatgaatccagaaaag

SEQ ID NO: 399 - DNA, 24 bp, Artificial Sequence
  Primer sequence
gctacccgtgatattgctgaagag

SEQ ID NO: 400 - DNA, 24 bp, Artificial Sequence
  Primer sequence
gagactctaattggataccgaggg

SEQ ID NO: 401 - DNA, 23 bp, Artificial Sequence
  Primer sequence
agcagatcgttcaaacatttggc

SEQ ID NO: 402 - DNA, 23 bp, Artificial Sequence
  Primer sequence
gcgcggtgtcatctatgttacta

SEQ ID NO: 403 - DNA, 1554 bp, Arabidopsis thaliana
atggcgatggccatggctcttcgaaggctttcttcttcaattgacaaacccattcgtcctcttattcgatccacttcatgttacatgtcttctttgcccagtgaagctgttgatgagaaggaaagatctcgtgtcacttggccaaaacagcttaacgcacctttagaggaggttgatcctgagattgctgacattattgagcatgagaaagctagacaatggaagggacttgaacttattccatctgagaacttcacatctgtgtcggtgatgcaagctgttgggtctgtcatgactaacaaatacagtgaaggctatcctggtgccagatactatggaggaaatgagtatatagacatggcagaaaccttatgccagaagcgcgctcttgaagctttccggttagatcctgaaaagtggggagtgaatgttcaacctttgtctggatctcctgccaacttccatgtgtacactgcattgttaaagcctcatgaaagaatcatggcacttgatcttcctcatggtggtcatctttctcatggttatcagactgacaccaagaagatatcagctgtgtctatcttctttgaaacaatgccctatagattggacgagagcactggctacatcgactacgatcagatggagaaaagtgctactcttttcaggccaaaattgattgttgctggtgcaagtgcttatgctagattgtatgactatgcccgcatcagaaaggtctgtaacaagcaaaaagctgtaatgctagcagatatggcacacatcagtggtttggttgctgctaatgtaatcccttcaccgttcgactatgctgatgttgtaaccaccacaactcacaagtcacttcgtggaccccgtggagccatgattttcttcagaaagggtgttaaggaaattaacaagcaagggaaagaggttttgtatgattttgaagacaagatcaaccaagctgtcttccctggtcttcaaggtggtccacacaaccacactatcacaggactagctgttgctttgaaacaggcaactacttcagagtacaaagcataccaagaacaagtcctgagtaacagtgcaaagtttgctcagactctaatggagagaggatatgaacttgtttctggtggaactgacaaccatctggttctagtgaatctaaagcccaagggaattgatggatctagagttgagaaagtgttggaagctgttcacattgcatccaacaaaaacactgttcctggagatgtttctgccatggttcctggtggaatcagaatgggtactcctgctctcacttccagaggctttgttgaggaagactttgccaaagtagctgaatacttcgacaaagctgtgacaatagctctcaaagtcaaatctgaagctcaaggaaccaagttgaaggatttcgtgtcagcaatggaatcctcttcaaccatccaatccgagattgcgaaactgcgccatgaagtcgaggaattcgctaagcagttcccaacaattgggtttgagaaagaaaccatgaagtacaagaactaa

SEQ ID NO: 404 - protein, 517 aa, Arabidopsis thaliana
MAMAMALRRLSSSIDKPIRPLIRSTSCYMSSLPSEAVDEKERSRVTWPKQLNAPLEEVDPEIADIIEHEKARQWKGLELIPSENFTSVSVMQAVGSVMTNKYSEGYPGARYYGGNEYIDMAETLCQKRALEAFRLDPEKWGVNVQPLSGSPANFHVYTALLKPHERIMALDLPHGGHLSHGYQTDTKKISAVSIFFETMPYRLDESTGYIDYDQMEKSATLFRPKLIVAGASAYARLYDYARIRKVCNKQKAVMLADMAHISGLVAANVIPSPFDYADVVTTTTHKSLRGPRGAMIFFRKGVKEINKQGKEVLYDFEDKINQAVFPGLQGGPHNHTITGLAVALKQATTSEYKAYQEQVLSNSAKFAQTLMERGYELVSGGTDNHLVLVNLKPKGIDGSRVEKVLEAVHIASNKNTVPGDVSAMVPGGIRMGTPALTSRGFVEEDFAKVAEYFDKAVTIALKVKSEAQGTKLKDFVSAMESSSTIQSEIAKLRHEVEEFAKQFPTIGFEKETMKYKN

SEQ ID NO: 405 - DNA, 1104 bp, Arabidopsis thaliana
atggagatcactaacgttaccgagtatgatgcaatcgcaaagcagaagctgcctaagatggtgtacgactactatgcatctggtgcagaagaccaatggactcttcaagagaacagaaacgcttttgcaaggatcctctttcggcctcggattctgattgatgtgagcaagattgacatgacaaccaccgtcttggggttcaagatctcgatgcccatcatggttgctccaactgccatgcaaaagatggctcaccctgatggggaatatgctactgctagagctgcatctgcagctggaactatcatgacactatcttcatgggctacttccagcgttgaagaagttgcgtctacagggccagggatccgattcttccagctctatgtatacaagaacaggaatgtggttgagcagctcgtgagaagagctgagagggctgggttcaaagccattgctctcactgtagacaccccaaggctaggccgcagagagtctgatatcaagaacagattcactttgcctccaaacctgacattgaagaactttgaaggacttgacctcggaaagatggacgaggccaatgactctggcttggcttcatatgttgctggtcaaattgaccgtaccttaagctggaaggatgtccagtggctccagacaatcaccaagttgcccattcttgtcaaaggtgttcttacaggagaggatgcaaggatagcgattcaagctggtgcagccggaatcattgtatcaaaccatggagctcgccagcttgactatgtcccagcaaccatctcggcccttgaagaggttgtcaaagcgacacaaggacgaattcctgtcttcttggatggtggtgttcgacgtggcactgatgtcttcaaagcacttgcacttggagcctccgggatatttattggaagaccagtggtattctcattggcagctgaaggagaggctggagttagaaaggtgcttcaaatgctacgtgatgagttcgagctgaccatggcactgagtgggtgtcggtccctaaaggaaatctcccgtaaccacattaccaccgaatgggacactccacgtccttcagccaggttatag

SEQ ID NO: 406 - protein, 367 aa, Arabidopsis thaliana
MEITNVTEYDAIAKQKLPKMVYDYYASGAEDQWTLQENRNAFARILFRPRILIDVSKIDMTTTVLGFKISMPIMVAPTAMQKMAHPDGEYATARAASAAGTIMTLSSWATSSVEEVASTGPGIRFFQLYVYKNRNVVEQLVRRAERAGFKAIALTVDTPRLGRRESDIKNRFTLPPNLTLKNFEGLDLGKMDEANDSGLASYVAGQIDRTLSWKDVQWLQTITKLPILVKGVLTGEDARIAIQAGAAGIIVSNHGARQLDYVPATISALEEVVKATQGRIPVFLDGGVRRGTDVFKALALGASGIFIGRPVVFSLAAEGEAGVRKVLQMLRDEFELTMALSGCRSLKEISRNHITTEWDTPRPSARL

SEQ ID NO: 407 - DNA, 1104 bp, Arabidopsis thaliana
atggagatcactaacgttaccgagtatgatgcaatcgcaaaggcgaagttgcctaagatggtatatgactactatgcatctggtgcagaagatcaatggactcttcaagagaacagaaacgcttttgcaagaatcctcttccggcctcggattttgattgatgtgaacaaaattgatatggcgactaccgtcttggggttcaagatctcgatgccgatcatggttgctcctactgcctttcaaaagatggctcaccctgatggggaatatgctacggctagagctgcgtctgctgctggaaccatcatgacactatcttcatgggctacttcaagtgttgaagaagttgcttccacagggccaggaatccgattcttccagctctatgtatacaagaacaggaaggtggttgagcagctcgtgagaagagccgagaaagctgggttcaaagccattgctctcactgtagacaccccaaggctaggtcgcagagagtctgatatcaagaacagattcactttgcctccaaacctgacattgaagaactttgaaggtcttgaccttggaaagatggacgaggccaatgactctggcttggcttcgtatgttgctggtcaaattgaccgtaccttgagctggaaggatatccagtggctccaaacaatcaccaacatgccaattcttgtcaagggtgttcttacaggagaggatgcaaggatagcgattcaagctggagcagcagggatcattgtgtcaaatcatggagctcgccagcttgattatgtcccagcaacaatctcagcccttgaagaggttgtcaaagcaacacaaggacgagttcctgtcttcttggatggtggtgttcgacgtggcactgatgtcttcaaggcacttgcacttggagcctctggaatatttattggaagaccagtggtttttgcactagctgctgaaggagaagccggagtcaaaaaggtgcttcaaatgttgcgtgatgagttcgagctaaccatggcactaagtgggtgccggtcactcagtgaaatcacccgtaaccacattgtcacggaatgggacactccacgccatttgcccaggttatag

SEQ ID NO: 408 - protein, 367 aa, Arabidopsis thaliana
MEITNVTEYDAIAKAKLPKMVYDYYASGAEDQWTLQENRNAFARILFRPRILIDVNKIDMATTVLGFKISMPIMVAPTAFQKMAHPDGEYATARAASAAGTIMTLSSWATSSVEEVASTGPGIRFFQLYVYKNRKVVEQLVRRAEKAGFKAIALTVDTPRLGRRESDIKNRFTLPPNLTLKNFEGLDLGKMDEANDSGLASYVAGQIDRTLSWKDIQWLQTITNMPILVKGVLTGEDARIAIQAGAAGIIVSNHGARQLDYVPATISALEEVVKATQGRVPVFLDGGVRRGTDVFKALALGASGIFIGRPVVFALAAEGEAGVKKVLQMLRDEFELTMALSGCRSLSEITRNHIVTEWDTPRHLPRL

SEQ ID NO: 409 - DNA, 2918 bp, Epipremnum Aureum
gtggctcttcagtggacgaaagggcctcgtgatacgcctatttttataggttaatgtcatgataataatggtttcttagacgtcaggtggcacttttcggggaaatgtgcgcggaacccctatttgtttatttttctaaatacattcaaatatgtatccgctcatgagacaataaccctgataaatgcttcaataatattgaaaaaggaagagtatgcgctcacgcaactggtccagaaccttgaccgaacgcagcggtggtaacggcgcagtggcggttttcatggcttgttatgactgtttttttggggtacagtctatgcctcgggcatccaagcagcaagcgcgttacgccgtgggtcgatgtttgatgttatggagcagcaacgatgttacgcagcagggcagtcgccctaaaacaaagttaaacatcatgagggaagcggtgatcgccgaagtatcgactcaactatcagaggtagttggcgtcatcgagcgccatctcgaaccgacgttgctggccgtacatttgtacggctccgcagtggatggcggcctgaagccacacagcgatattgatttgctggttacggtgaccgtaaggcttgatgaaacaacgcggcgagctttgatcaacgaccttttggaaacttcggcttcccctggagagagcgagattctccgcgctgtagaagtcaccattgttgtgcacgacgacatcattccgtggcgttatccagctaagcgcgaactgcaatttggagaatggcagcgcaatgacattcttgcaggtatcttcgagccagccacgatcgacattgatctggctatcttgctgacaaaagcaagagaacatagcgttgccttggtaggtccagcggcggaggaactctttgatccggttcctgaacaggatctatttgaggcgctaaatgaaaccttaacgctatggaactcgccgcccgactgggctggcgatgagcgaaatgtagtgcttacgttgtcccgcatttggtacagcgcagtaaccggcaaaatcgcgccgaaggatgtcgctgccgactgggcaatggagcgcctgccggcccagtatcagcccgtcatacttgaagctagacaggcttatcttggacaagaagaagatcgcttggcctcgcgcgcagatcagttggaagaatttgtccattacgtaaaaggcgagatcaccaaggtagtcggcaaataactgtcagaccaagtttactcatatatactttagattgatttaaaacttcatttttaatttaaaaggatctaggtgaagatcctttttgataatctcatgaccaaaatcccttaacgtgagttttcgttccactgagcgtcagaccccgtagaaaagatcaaaggatcttcttgagatcctttttttctgcgcgtaatctgctgcttgcaaacaaaaaaaccaccgctaccagcggtggtttgtttgccggatcaagagctaccaactctttttccgaaggtaactggcttcagcagagcgcagataccaaatactgtccttctagtgtagccgtagttaggccaccacttcaagaactctgtagcaccgcctacatacctcgctctgctaatcctgttaccagtggctgctgccagtggcgataagtcgtgtcttaccgggttggactcaagacgatagttaccggataaggcgcagcggtcgggctgaacggggggttcgtgcacacagcccagcttggagcgaacgacctacaccgaactgagatacctacagcgtgagctatgagaaagcgccacgcttcccgaagggagaaaggcggacaggtatccggtaagcggcagggtcggaacaggagagcgcacgagggagcttccagggggaaacgcctggtatctttatagtcctgtcgggtttcgccacctctgacttgagcgtcgatttttgtgatgctcgtcaggggggcggagcctatggaaaaacgccagcaacgcggcctttttacggttcctggccttttgctggccttttgctcacatgttctttcctgcgttatcccctgattctgtggataaccgtattaccgcctttgagtgagctgataccgctcgccgcagccgaacgaccgagcgcagcgagtcagtgagcgaggaagcggaagagcgcccaatacgcaaaccgcctctccccgcgcgttggccgattcattaatcactctgtggtctcagcttgctgtaaagaaattgatgggcagtgggcttttgttactagttagtaggagaggttgcttcagtttcgtccgtacctgttcttgaccttctgtttctggagtctgtactccgtttgttgtaaagtcttgtcctttttttaaaacttctttctatccactgttgaatgagccagtagatgctgtcctgttacgcgtttctcttctcttgcacatgcacagtctccgttttgtaggatgctgaacgaagctctcgggtttatggaggtcaatccctaagtattgtcgattcaaaagggtgatgtttttttcccccaacaaagctcttcagtgagttcaaccaagtgggtgagatgtgtataggttactggacaatcttgttggtttggagaggagaaaaagtagctatattgatctgtgccagtgctagcacagggagagtcttatctttttgggttagtgttacagctagatgattgagatgatcatctgcacttgatttgatcagctggttttgtctttgtaagattagcctgtcacttgacgaaaaaaagcggtttgtctgtcctcggttacgattcagactggtttggatgacgtccatattaagatcctgtatttacgtttgctgctctcattttctgcaagctttccgaggatgtccaaaagctcgcttgagaccacgaa

SEQ ID NO: 410 - DNA, 831 bp, Epipremnum Aureum
gctgtaaagaaattgatgggcagtgggcttttgttactagttagtaggagaggttgcttcagtttcgtccgtacctgttcttgaccttctgtttctggagtctgtactccgtttgttgtaaagtcttgtcctttttttaaaacttctttctatccactgttgaatgagccagtagatgctgtcctgttacgcgtttctcttctcttgcacatgcacagtctccgttttgtaggatgctgaacgaagctctcgggtttatggaggtcaatccctaagtattgtcgattcaaaagggtgatgtttttttcccccaacaaagctcttcagtgagttcaaccaagtgggtgagatgtgtataggttactggacaatcttgttggtttggagaggagaaaaagtagctatattgatctgtgccagtgctagcacagggagagtcttatctttttgggttagtgttacagctagatgattgagatgatcatctgcacttgatttgatcagctggttttgtctttgtaagattagcctgtcacttgacgaaaaaaagcggtttgtctgtcctcggttacgattcagactggtttggatgacgtccatattaagatcctgtatttacgtttgctgctctcattttctgcaagctttccgaggatgtccaaaagctgcattttttttttgtcgttggtaaatgttactttcgataattttaaggttgtggctgagtgatacgaggtgttttctcgaagataatggtcttagagttttattcttggccttccacaaaaggcaaaaaaaagctaactcaaatgagttcttagtgttgaggtc
